(19) United States
(12) Patent Application Publication
(10) Pub. No.: US 2019/0309317 A1
(43) Pub. Date: Oct. 10, 2019

(54) COMPOSITIONS AND METHODS FOR PRODUCING TOBACCO PLANTS AND PRODUCTS HAVING ALTERED ALKALOID LEVELS

(71) Applicant: Altria Client Services LLC, Richmond, VA (US)

(72) Inventors: Andrew Carl Adams, Midlothian, VA (US); Marcos Fernando de Godoy Lusso, Chesterfield, VA (US); Sreepriya Pramod, Glen Allen, VA (US); Dongmei Xu, Glen Allen, VA (US)

(73) Assignee: Altria Client Services LLC, Richmond, VA (US)

(21) Appl. No.: 16/471,960

(22) PCT Filed: Dec. 20, 2017
(86) PCT No.: PCT/US2017/067687

§ 371 Date: Jun. 20, 2019

Related U.S. Application Data
(60) Provisional application No. 62/437,623, filed on Dec. 21, 2016.

(51) Int. Cl. C12N 15/82; A24B 3/12; A24B 15/20; A24B 13/00

(52) U.S. Cl. CPC C12N 15/8243; A24B 13/00; A24B 15/20; A24B 3/12

(57) ABSTRACT

The present disclosure provides the identification of tobacco Nic1 locus. Also provided are tobacco plants with altered total alkaloid and nicotine levels and commercially acceptable leaf grade, their development via breeding or transgenic approaches, and production of tobacco products from these tobacco plants. Also provided are compositions and methods for producing tobacco plants having novel Nic1 mutations or alleles to reduce nicotine levels. Further provided are sequence polymorphisms and molecular markers for breeding tobacco with reduced nicotine or nicotine free while maintaining tobacco leaf grade and tobacco product quality.

### CROSS-REFERENCE TO RELATED APPLICATIONS

[0001] This application claims priority to U.S. Provisional Application No. 62/437,623, filed Dec. 21, 2016, which is incorporated by reference in its entirety herein.

### INCORPORATION OF SEQUENCE LISTING

[0002] A sequence listing contained in the file named “P34319WO01.txt” which is 3,616,510 bytes (measured in MS-Windows®) and created on Dec. 20, 2017, comprising 139 nucleotide sequences and 37 amino acid sequences, is filed electronically herewith and incorporated by reference in its entirety.

### FIELD

[0003] The present disclosure provides the identification of tobacco Nic1 locus. Also provided are tobacco plants with altered total alkaloid and nicotine levels and commercially acceptable leaf grade, their development via breeding or transgenic approaches, and production of tobacco products from these tobacco plants.

### BACKGROUND

[0004] Four major alkaloids are found in tobacco: nicotine, nornicotine, anabasine, and anatabine. Nicotine is the predominant alkaloid, usually accounting for more than 90% of the total alkaloids in commercial tobacco cultivars. Nicotine biosynthesis occurs predominantly in tobacco roots. Tobacco plants then transport nicotine through the vascular bundle to leaves where nicotine is then stored in the vacuoles.

[0005] A variety of factors affect tobacco alkaloid levels including genotype, environment, fertilization, and agronomic practices (for example, nicotine production is stimulated by topping, wounding, and herbivore damage). Low-alkaloid traits initially found in strains of Cuban cigar tobacco varieties were introduced into cigarette varieties through a series of backcrosses. Low- alkaloid tobacco germplasm was subsequently registered in the genetic background of cultivar Burley 21 (Legg et al., Crop Science, 10:212 (1970)). Genetic studies using the low alkaloid Burley 21 (LA BU21) lines indicated that two unlinked loci contribute to nicotine levels in the tobacco leaf. These two loci are referred to as Nic1 and Nic2. The nic1 and nic2 mutations in LA BU21 are semidominant. They show dose-dependent effects on nicotine levels, with the effects of nic1 about 2.4 times stronger than those of nic2. Molecular characterization of Nic2 locus has been reported. The nic2 mutation was shown to contain a deletion of a cluster of transcription factor genes from the ethylene responsive factor (ERF) family.

[0006] Reducing total alkaloid content in tobacco can have many benefits. It can increase the value of tobacco as a biomass resource. Increases in nicotinic alkaloid in tobacco plants may play an important role in protecting plants against insects and herbivores.

[0007] Consistent with alkaloids' role in insect defense, LA BU21 was reported to be extremely susceptible to insect damage (Legg et al., Crop Science, 10:212 (1970)). A further study comparing isogenic lines of flue-cured tobacco with low total alkaloids percentage (approximately 0.20%) with their “normal” recurring parents (total alkaloids 1.85 to 2.70%) reported that yield, grade index, total N, and reducing sugar content in the low alkaloid lines were lower than in the normal flue-cured cultivars (Chaplin and Weeks, Crop Science, 16(3):416-18 (1976)).

[0008] There is a need to identify novel genes that regulate tobacco nicotine levels, and to develop tobacco plants and products that contain altered nicotine levels (e.g., reduced nicotine) while maintaining (if not making superior) tobacco leaf quality.

### SUMMARY

[0009] In some aspects, the present disclosure provides tobacco plants, or part thereof, comprising a mutation in Nic1 locus, a mutation in Nic2 locus, or both, wherein the tobacco plant is capable of producing leaves having a USDA grade index value of 50 or more.

[0010] In other aspects, the present disclosure provides tobacco plants, or part thereof, comprising a mutation in Nic1 locus, a mutation in Nic2 locus, or both, wherein the tobacco plant is capable of producing leaves having a USDA grade index value comparable to that of a control plant when grown in similar growth conditions, wherein the control plant shares an essentially identical genetic background with the tobacco plant except the mutation.

[0011] In some aspects, the present disclosure further provides non-transgenic tobacco plants, or part thereof, comprising a nicotine level selected from the group consisting of less than 2.0%, wherein the tobacco plants are capable of producing leaves having a USDA grade index value of 50 or more.

[0012] In other aspects, the present disclosure also provides a tobacco plant, or part thereof, comprising a non-transgenic mutation, wherein the non-transgenic mutation reduces the nicotine level of the tobacco plant to about 20% or less of the nicotine level of a control plant when grown in similar growth conditions, wherein the tobacco plant is capable of producing leaves having a USDA grade index value comparable to the USDA grade index value of the control plant, and wherein the control plant shares an essentially identical genetic background with the tobacco plant except the non-transgenic mutation.

[0013] In some aspects, the present disclosure provides tobacco plants, or part thereof, comprising a mutation in Nic1 locus, a mutation in Nic2 locus, or both, wherein the tobacco plant comprise a similar level of one or more tobacco aroma compounds selected from the group consisting of 3-methylvaleric acid, valeric acid, isovaleric acid, a labdenoid, a cembrenoid, a sugar ester, and a reducing sugar, compared to a control tobacco plant when grown in similar growth conditions.

[0014] In other aspects, the present disclosure provides tobacco plants, or part thereof, comprising a mutation in Nic1 locus, wherein the mutation is absent from LA Burley 21. In some aspects, tobacco plants provided herein comprise a shorter chromosome deletion at Nic1 locus compared to LA Burley 21. In other aspects, tobacco plants provided herein comprise no deletion of a complete gene or a complete genic coding sequence in Nic1 locus.

[0015] In some aspects, the present disclosure provides tobacco plants, or part thereof, comprising one or more mutations within one or more genes comprising a sequence having at least 80% identity to a sequence selected from the group consisting of SEQ ID NOs: 9 to 28, 75 to 82, 86 to 100, 145, and fragments thereof. In some aspects, tobacco plants provided herein comprise one or more non-naturally existing mutant alleles at Nic1 locus which reduce or eliminate one or more gene activity from Nic1 or Nic2 locus. In some aspects, these mutant alleles result in lower nicotine levels.

[0016] In other aspects, the present disclosure provides tobacco plants, or part thereof, comprising one or more mutations within one or more genes comprising a coding sequence having at least 80% identity to a sequence selected from the group consisting of SEQ ID NOs: 29 to 48, 83, 101 to 115, 146, and fragments thereof.

[0017] In some aspects, the present disclosure provides tobacco plants, or part thereof, comprising one or more mutations within one or more genes encoding a polypeptide having at least 80% identity to a sequence selected from the group consisting of SEQ ID NOs: 49 to 68, 84, 116 to 130, 147, and fragments thereof.

[0018] In other aspects, the present disclosure provides tobacco plants, or part thereof, comprising a heterologous expression cassette comprising a Nic1 inhibitory sequence of a gene comprising a sequence having at least 80% identity to a sequence selected from the group consisting of SEQ ID NOs: 9 to 28, 75 to 82, 86 to 100, 145, and fragments thereof, wherein the inhibitory sequence is operably linked to a promoter that is functional in a plant cell, and wherein the inhibitory sequence has at least 90% sequence identity to a fragment of at least 21 nucleotides of the sequence having at least 80% identity to a sequence selected from the group consisting of SEQ ID NOs: 9 to 28, 75 to 82, 86 to 100, 145, and fragments thereof.

[0019] In other aspects, the present disclosure provides recombinant DNA constructs comprising a promoter that is functional in a tobacco cell and operably linked to a polynucleotide that encodes an RNA molecule capable of binding to an RNA encoding a polypeptide having an amino acid sequence at least 80% identical to an amino acid sequence selected from the group consisting of SEQ ID NOs: 49 to 68, 84, 116 to 130, 147, and fragments thereof, and wherein the RNA molecule suppresses the expression of the polypeptide.

[0020] In some aspects, the present disclosure provides recombinant DNA constructs comprising a promoter that is functional in a tobacco cell and operably linked to a polynucleotide that encodes a polypeptide having an amino acid sequence at least 80% identical to an amino acid sequence selected from the group consisting of SEQ ID NOs: 49 to 68, 84, 116 to 130, 147, and fragments thereof.

[0021] The present disclosure further provides cured tobacco, tobacco blends, tobacco products comprising plant material from tobacco plants, lines, varieties or hybrids disclosed herein.

[0022] The present disclosure also provides methods for breeding tobacco lines, cultivars, or varieties comprising a desirable level of total alkaloid or nicotine, e.g., low nicotine or nicotine free. In some aspects, the present disclosure provides a method of introgressing a low nicotine trait into a tobacco variety, the method comprising: (a) crossing a first tobacco variety comprising a low nicotine trait with a second tobacco variety without the low nicotine trait to produce one or more progeny tobacco plants; (b) genotyping the one or more progeny tobacco plants for a polymorphic marker linked to the low nicotine trait, wherein the polymorphic marker is in a chromosomal interval flanked by any two of polymorphic loci listed in Table 3 or flanked by any two of polymorphic loci listed in Table 4; and (c) selecting a progeny tobacco plant comprising the low nicotine trait.

[0023] In some aspects, the present disclosure provides a method of introgressing a low nicotine trait into a tobacco variety, the method comprising: (a) crossing a first tobacco variety comprising a low nicotine trait with a second tobacco variety without the low nicotine trait to produce one or more progeny tobacco plants; (b) genotyping the one or more progeny tobacco plants for a polymorphic marker linked to the low nicotine trait, wherein the polymorphic marker is within 20 cM of any one of polymorphic loci listed in Tables 3, 4, 16, and 17; and (c) selecting a progeny tobacco plant comprising the low nicotine trait. In one aspect, a polymorphic marker is a SNP marker selected from the group consisting of SEQ ID Nos. 131 to 144.

[0024] In other aspects, the present disclosure provides a method of selecting a tobacco plant having a low nicotine trait, the method comprising: (a) isolating nucleic acids from a collection of tobacco germplasm; (b) assaying the nucleic acids for one or more markers closely linked to Nic1 locus; and (c) selecting a tobacco plant having a low nicotine trait based on the marker assay.

### BRIEF DESCRIPTION OF THE DRAWINGS

[0025] FIG. 1 shows the number of differentially regulated genes for each pairwise comparison within the group of BU21, HI BU21, LI BU21 and LA BU2.

[0026] FIG. 2 shows that Nic1 regulates genes involved in nicotine biosynthesis. Red arrows indicate genes whose expression is upregulated in the presence of Nic1, especially within comparisons (i) BU21vs LA BU21, and (ii) HI BU21 vs LA BU21.

[0027] FIG. 3 shows genotypic and chemistry data of an F₂ population by plotting the chemistry (y axis) of each plant by it genotype (x axis).

[0028] FIG. 4 is identical to FIG. 3 except excluding 8 outliers likely due to sampling errors.

[0029] FIG. 5 shows percent nicotine levels of isogenic BU21 low alkaloid series (LA BU21, LI BU21, HI BU21, and BU21) in a 2014 field test.

[0030] FIG. 6 shows percent nicotine levels of isogenic BU21 low alkaloid series (LA BU21, LI BU21, HI BU21, and BU21) in a 2015 field test.

[0031] FIG. 7 shows the relative genomic position of NDG1 to NDG15 genes on SEQ ID NO: 85 which is shown in four overlapping segments (from top to bottom, nucleotide 1 to ˜100k, ˜100k to ˜200k, ˜200k to ˜300k, and ˜300k to 425k, respectively).

### BRIEF DESCRIPTION OF THE SEQUENCES

[0032] SEQ ID No: 1 sets forth the sequence of a Nic1 associated deletion, Scaffold0002504, identified from LA BU21.

[0033] SEQ ID No: 2 sets forth the sequence of a Nic2 associated deletion, Scaffold0000549, identified from LA BU21.

[0034] SEQ ID Nos: 3 to 8 set forth primer sequences used for PCR confirmation of identified Nic1 and Nic2 deletions.

[0035] SEQ ID Nos: 9 to 28 set forth genomic sequences of 20 annotated genes in Nic1 associated deletion Scaffold0002504.

[0036] SEQ ID Nos: 29 to 48 set forth cDNA sequences of 20 annotated genes in Nic1 associated deletion Scaffold0002504.

[0037] SEQ ID Nos: 49 to 68 set forth amino acid sequences encoded by 20 annotated genes in Nic1 associated deletion Scaffold0002504.

[0038] SEQ ID Nos: 69 and 70 set forth exemplary transformation cassette sequences for suppressing g100614_Scaffold0002504 and g100631_Scaffold0002504 via RNA interference (RNAi).

[0039] SEQ ID Nos: 71 and 72 set forth reference TN90 alleles of sequence polymorphisms.

[0040] SEQ ID No: 73 sets forth the sequence of a tobacco genomic sequence assembly NT2.0-Scaffold4274 which comprises a re-sequenced segment of NT1.0-Scaffold0002504. Specifically, nucleotides 148796 to 282345 of NT2.0-Scaffold4274 correspond to and replace NT1.0-Scaffold0002504 between nucleotides 384701 to 542313 in the minus orientation. SEQ ID No: 74 sets forth the sequence of a tobacco genomic sequence assembly NT2.0-Scaffold14415 which comprises a re-sequenced segment of NT1.0-Scaffold0002504. Specifically, nucleotides 1 to 59671 of NT2.0- Scaffold14415 correspond to and replace NT1.0-Scaffold0002504 between nucleotides 288601 to 363040 in the minus orientation.

[0041] SEQ ID Nos: 75 and 82 set forth re-sequenced and re-fined genomic sequences of eight annotated genes in Nic1 associated deletion.

[0042] SEQ ID Nos: 83 and 84 set forth further annotated cDNA and amino acid sequences of the gene in g100623_Scaffold0002504 based on re-sequencing.

[0043] SEQ ID No: 85 sets forth the genomic sequence of the complete Nic1 deletion region in LA BU21.

[0044] SEQ ID Nos: 86 to 100 set forth genomic sequences of 15 annotated genes in SEQ ID No: 85.

[0045] SEQ ID Nos: 101 to 115 set forth cDNA sequences of 15 annotated genes in SEQ ID No: 85.

[0046] SEQ ID Nos: 116 to 130 set forth protein sequences of 15 annotated genes in SEQ ID No: 85.

[0047] SEQ ID Nos: 131 to 142 set forth 12 SNP marker sequences flanking nic1 or nic2 deletion.

[0048] SEQ ID Nos: 143 and 144 set forth two SNP marker sequences associated with an ERF-39 like gene.

[0049] SEQ ID Nos: 145 to 147 set forth genomic, cDNA, and protein sequences of an ERF-39 like gene.

[0050] SEQ ID Nos: 148 to 164 set forth sequences of inverted repeat-containing RNAi cassettes targeting NDG1 to NDG15.

[0051] SEQ ID Nos: 165 to 176 set forth oligonucleotide and probe sequences for the expression analysis of NDG1.

[0052] Various sequences disclosed herein include “N” in nucleotide sequences or “X” in amino acid sequences. “N” can be any nucleotide, e.g., A, T, G, C, or a deletion or insertion of one or more nucleotides. In some instant, a string of “N” are shown. The number of “N” does not necessarily correlate with the actual number of undetermined nucleotides at that position. The actual nucleotide sequences can be longer or shorter than the shown segment of “N”. Similarly, “X” can be any amino acid residue or a deletion or insertion of one or more amino acids. Again, the number of “X” does not necessarily correlate with the actual number of undetermined amino acids at that position. The actual amino acid sequences can be longer or shorter than the shown segment of “X”.

### DETAILED DESCRIPTION

[0053] Unless defined otherwise, technical and scientific terms used herein have the same meaning as commonly understood by one of ordinary skill in the art. One skilled in the art will recognize many methods can be used in the practice of the present disclosure. Indeed, the present disclosure is in no way limited to the methods and materials described. For purposes of the present disclosure, the following terms are defined below.

[0054] Any references cited herein, including, e.g., all patents and publications are incorporated by reference in their entirety.

[0055] As used herein, the singular form “a,” “an,' and “the” include plural references unless the context clearly dictates otherwise. For example, the term “a compound” or “at least one compound” may include a plurality of compounds, including mixtures thereof.

[0056] The term “about” is used herein to mean approximately, roughly, around, or in the region of When the term “about” is used in conjunction with a numerical range, it modifies that range by extending the boundaries above and below the numerical values set forth.

[0057] As used herein, a “Nic1 locus” refers to any chromosomal position or location within or closely linked to the Nic1 Region. “Nic1 Region” refers to a chromosomal segment of about 425,000 bps long, corresponding to SEQ ID No. 85 from a TN90 genome, and having allele(s) associated with a low-alkaloid trait. A “nic1 mutation” refers to a mutation in a Nic1 locus.

[0058] As used herein, a tobacco plant can be from any plant from the Nicotiana genus including, but not limited to Nicotiana tabacum, Nicotiana amplexicaulis PI 271989; Nicotiana benthamiana PI 555478; Nicotiana bigelovii PI 555485; Nicotiana debneyi; Nicotiana excelsior PI 224063; Nicotiana glutinosa PI 555507; Nicotiana goodspeedii PI 241012; Nicotiana gossei PI 230953; Nicotiana hesperis PI 271991; Nicotiana knightiana PI 555527; Nicotiana maritima PI 555535; Nicotiana megalosiphon PI 555536; Nicotiana nudicaulis PI 555540; Nicotiana paniculata PI 555545; Nicotiana plumbaginifolia PI 555548; Nicotiana repanda PI 555552; Nicotiana rustica; Nicotiana suaveolens PI 230960; Nicotiana sylvestris PI 555569; Nicotiana tomentosa PI 266379; Nicotiana tomentosiformis; and Nicotiana trigonophylla PI 555572.

[0059] In some aspects, the present disclosure provides tobacco plants, or part thereof, comprising a mutation in Nic1 locus, a mutation in Nic2 locus, or both, wherein the tobacco plant is capable of producing leaves having a USDA grade index value of 50 or more. In some aspects, tobacco plants disclosed herein are capable of producing leaves having a USDA grade index value selected from the group consisting of 55 or more, 60 or more, 65 or more, 70 or more, 75 or more, 80 or more, 85 or more, 90 or more, and 95 or more. In other aspects, tobacco plants disclosed herein are capable of producing leaves having a USDA grade index value comparable to that of a control plant when grown in similar growth conditions, wherein the control plant shares an essentially identical genetic background with the tobacco plant except the mutation. In further aspects, tobacco plants disclosed herein are capable of producing leaves having a USDA grade index value of at least about 65%, at least about 70%, at least about 75%, at least about 80%, at least about 85%, at least about 90%, at least about 95%, or at least about 98% of the USDA grade index value of a control plant when grown in similar growth conditions, wherein the control plant shares an essentially identical genetic background with the tobacco plant except the mutation. In further aspects, tobacco plants disclosed herein are capable of producing leaves having a USDA grade index value of between 65% and 130%, between 70% and 130%, between 75% and 130%, between 80% and 130%, between 85% and 130%, between 90% and 130%, between 95% and 130%, between 100% and 130%, between 105% and 130%, between 110% and 130%, between 115% and 130%, or between 120% and 130% of the USDA grade index value of the control plant. In further aspects, tobacco plants disclosed herein are capable of producing leaves having a USDA grade index value of between 70% and 125%, between 75% and 120%, between 80% and 115%, between 85% and 110%, or between 90% and 100% of the USDA grade index value of the control plant. In some aspects, tobacco plants disclosed herein comprise nicotine at a level below 1%, below 2%, below 5%, below 8%, below 10%, below 12%, below 15%, below 20%, below 25%, below 30%, below 40%, below 50%, below 60%, below 70%, or below 80% of the nicotine level of a control plant when grown in similar growth conditions, wherein the control plant shares an essentially identical genetic background with the tobacco plant except the mutation. In other aspects, tobacco plants disclosed herein comprise a nicotine level selected from the group consisting of less than 3%, less than 2.75%, less than 2.5%, less than 2.25%, less than 2.0%, less than 1.75%, less than 1.5%, less than 1.25%, less than 1%, less than 0.9%, less than 0.8%, less than 0.7%, less than 0.6%, less than 0.5%, less than 0.4%, less than 0.3%, less than 0.2%, less than 0.1%, and less than 0.05%. In further aspects, tobacco plants disclosed herein further comprises a transgene or mutation directly suppressing the expression or activity of one or more genes encoding a product selected from the group consisting of PMT, MPO, QPT, BBL, A622, aspartate oxidase, agmatine deiminase (AIC), arginase, diamine oxidase, ornithine decarboxylase, arginine decarboxylase, nicotine uptake permease (NUP), and MATE transporter.

[0060] In some aspects, the present disclosure provides tobacco plants, or part thereof, comprising a mutation in Nic1 locus, a mutation in Nic2 locus, or both, wherein the tobacco plant is capable of producing leaves having a USDA grade index value comparable to that of a control plant when grown in similar growth conditions, wherein the control plant shares an essentially identical genetic background with the tobacco plant except the mutation. In other aspects, tobacco plants disclosed herein are capable of producing leaves having a USDA grade index value selected from the group consisting of 55 or more, 60 or more, 65 or more, 70 or more, 75 or more, 80 or more, 85 or more, 90 or more, and 95 or more. In other aspects, tobacco plants disclosed herein are capable of producing leaves having a USDA grade index value selected from the group consisting of between 50 and 95, between 55 and 95, between 60 and 95, between 65 and 95, between 70 and 95, between 75 and 95, between 80 and 95, between 85 and 95, between 90 and 95, between 55 and 90, between 60 and 85, between 65 and 80, between 70 and 75, between 50 and 55, between 55 and 60, between 60 and 65, between 65 and 70, between 70 and 75, between 75 and 80, between 80 and 85, between 85 and 90, and between 90 and 95. In further aspects, tobacco plants disclosed herein are capable of producing leaves having a USDA grade index value of at least about 65%, at least about 70%, at least about 75%, at least about 80%, at least about 85%, at least about 90%, at least about 95%, or at least about 98% of the USDA grade index value of the control plant. In further aspects, tobacco plants disclosed herein are capable of producing leaves having a USDA grade index value of between 65% and 130%, between 70% and 130%, between 75% and 130%, between 80% and 130%, between 85% and 130%, between 90% and 130%, between 95% and 130%, between 100% and 130%, between 105% and 130%, between 110% and 130%, between 115% and 130%, or between 120% and 130% of the USDA grade index value of the control plant. In further aspects, tobacco plants disclosed herein are capable of producing leaves having a USDA grade index value of between 70% and 125%, between 75% and 120%, between 80% and 115%, between 85% and 110%, or between 90% and 100% of the USDA grade index value of the control plant. In other aspects, tobacco plants disclosed herein comprise nicotine at a level below 1%, below 2%, below 5%, below 8%, below 10%, below 12%, below 15%, below 20%, below 25%, below 30%, below 40%, below 50%, below 60%, below 70%, or below 80% of the nicotine level of the control plant when grown in similar growth conditions. In other aspects, tobacco plants disclosed herein further comprises a transgene or mutation directly suppressing the expression or activity of one or more genes encoding a product selected from the group consisting of PMT, MPO, QPT, BBL, A622, aspartate oxidase, agmatine deiminase (AIC), arginase, diamine oxidase, ornithine decarboxylase, arginine decarboxylase, nicotine uptake permease (NUP), and MATE transporter.

[0061] In an aspect, a Nic1 locus comprises one or more sequences selected from the group consisting of SEQ ID No. 1, 9 to 28, 75 to 82, 85, and 86 to 100. In an aspect, a Nic1 locus comprises a sequence or a chromosomal segment of less than 50, 100, 200, 300, 400, 500, 600, 700, 800, 900, 1000, 1500, 2000, 3000, 4000, 5000, 6000, 7000, 8000, or 9000 nucleotides. In another aspect, a Nic1 locus comprises a sequence or a chromosomal segment of at least 50, 100, 200, 300, 400, 500, 600, 700, 800, 900, 1000, 1500, 2000, 3000, 4000, 5000, 6000, 7000, 8000, or 9000 nucleotides. In a further aspect, a Nic1 locus comprises a sequence or a chromosomal segment of between 100 and 300, between 100 and 400, between 100 and 500, between 100 and 600, between 100 and 700, between 100 and 800, between 100 and 900, between 100 and 1000, between 100 and 1500, between 100 and 2000, between 100 and 3000, between 100 and 4000, between 100 and 5000, between 100 and 6000, between 100 and 7000, between 100 and 8000, or between 100 and 9000 nucleotides. In an aspect, a Nic1 locus comprises a sequence or a chromosomal segment of between 50 and 100, between 100 and 200, between 200 and 300, between 300 and 400, between 400 and 500, between 500 and 600, between 600 and 700, between 700 and 800, between 800 and 900, between 900 and 1000, between 1000 and 1500, between 1500 and 2000, between 2000 and 3000, between 3000 and 4000, between 4000 and 5000, between 5000 and 6000, between 6000 and 7000, between 7000 and 8000, or between 8000 and 9000 nucleotides.

[0062] In an aspect, a Nic1 locus comprises a sequence or a chromosomal segment within 50, 100, 200, 300, 400, 500, 600, 700, 800, 900, 1000, 1500, 2000, 3000, 4000, 5000, 6000, 7000, 8000, 9000, 10000, 15000, 20000, 30000, 40000, 50000, 60000, or 70000 nucleotides of a SNP marker listed in Table 3. In another aspect, a Nic1 locus comprises a sequence or a chromosomal segment within between 100 and 300, between 100 and 400, between 100 and 500, between 100 and 600, between 100 and 700, between 100 and 800, between 100 and 900, between 100 and 1000, between 100 and 1500, between 100 and 2000, between 100 and 3000, between 100 and 4000, between 100 and 5000, between 100 and 6000, between 100 and 7000, between 100 and 8000, or between 100 and 9000 nucleotides of a SNP marker listed in Table 3. In a further aspect, a Nic1 locus comprises a sequence or a chromosomal segment within between 50 and 100, between 100 and 200, between 200 and 300, between 300 and 400, between 400 and 500, between 500 and 600, between 600 and 700, between 700 and 800, between 800 and 900, between 900 and 1000, between 1000 and 1500, between 1500 and 2000, between 2000 and 3000, between 3000 and 4000, between 4000 and 5000, between 5000 and 6000, between 6000 and 7000, between 7000 and 8000, or between 8000 and 9000 nucleotides of a SNP marker listed in Table 3.

[0063] In an aspect, a Nic1 locus comprises a sequence selected from the group consisting of SEQ ID Nos. 9 to 28, 75 to 82, and 86 to 100, and fragments thereof. In another aspect, a Nic1 locus comprises a sequence or a chromosomal segment within 50, 100, 200, 300, 400, 500, 600, 700, 800, 900, 1000, 1500, 2000, 3000, 4000, 5000, 6000, 7000, 8000, 9000, 10000, 15000, 20000, 30000, 40000, 50000, 60000, or 70000 nucleotides of a sequence selected from the group consisting of SEQ ID Nos. 9 to 28, 75 to 82, and 86 to 100. In a further aspect, a Nic1 locus comprises a sequence or a chromosomal segment within between 100 and 300, between 100 and 400, between 100 and 500, between 100 and 600, between 100 and 700, between 100 and 800, between 100 and 900, between 100 and 1000, between 100 and 1500, between 100 and 2000, between 100 and 3000, between 100 and 4000, between 100 and 5000, between 100 and 6000, between 100 and 7000, between 100 and 8000, or between 100 and 9000 nucleotides of a sequence selected from the group consisting of SEQ ID Nos. 9 to 28, 75 to 82, and 86 to 100. In an aspect, a Nic1 locus comprises a sequence or a chromosomal segment within between 50 and 100, between 100 and 200, between 200 and 300, between 300 and 400, between 400 and 500, between 500 and 600, between 600 and 700, between 700 and 800, between 800 and 900, between 900 and 1000, between 1000 and 1500, between 1500 and 2000, between 2000 and 3000, between 3000 and 4000, between 4000 and 5000, between 5000 and 6000, between 6000 and 7000, between 7000 and 8000, or between 8000 and 9000 nucleotides of a sequence selected from the group consisting of SEQ ID Nos. 9 to 28, 75 to 82, and 86 to 100.

[0064] In an aspect, a Nic1 locus comprises a sequence or chromosomal segment flanked by and not comprising any two of the sequences selected from the group consisting of SEQ ID Nos. 9 to 28, 75 to 82, and 86 to 100, and fragments thereof. In an aspect, a Nic1 locus comprises a sequence or chromosomal segment flanked by and not comprising any two of the SNP markers selected from the group consisting of SEQ ID Nos. 9 to 28, 75 to 82, and 86 to 100. In an aspect, a Nic1 locus comprises a sequence or chromosomal segment flanked by and not comprising any two of the sequences selected from the group consisting of SEQ ID Nos. 9 to 28, 75 to 82, and 86 to 100.

[0065] In some aspects, the present disclosure also provides a tobacco variety, cultivar, or line comprising a mutation selected from the group consisting of a nic1 mutation, a nic2 mutation, and a combination thereof, wherein the tobacco variety, cultivar, or line has a leaf grade comparable to the leaf grade of a control tobacco variety, cultivar, or line when grown in similar growth conditions, wherein the control tobacco variety shares an essentially identical genetic background with the tobacco variety, cultivar, or line except the mutation.

[0066] In some aspects, the present disclosure further provides non-transgenic tobacco plants, or part thereof, comprising a nicotine level selected from the group consisting of less than 3%, less than 2.75%, less than 2.5%, less than 2.25%, less than 2.0%, less than 1.75%, less than 1.5%, less than 1.25%, less than 1%, less than 0.9%, less than 0.8%, less than 0.7%, less than 0.6%, less than 0.5%, less than 0.4%, less than 0.3%, less than 0.2%, less than 0.1%, and less than 0.05%, wherein the tobacco plants are capable of producing leaves having a USDA grade index value of 50 or more 55 or more, 60 or more, 65 or more, 70 or more, 75 or more, 80 or more, 85 or more, 90 or more, and 95 or more. In other aspects, such non-transgenic tobacco plants comprise a nicotine level of less than 2.0% and are capable of producing leaves having a USDA grade index value of 70 or more. In furthers aspects, such non-transgenic tobacco plants comprise a nicotine level of less than 1.0% and are capable of producing leaves having a USDA grade index value of 70 or more.

[0067] In some aspects, the present disclosure also provides a tobacco plant, or part thereof, comprising a non-transgenic mutation, wherein the non-transgenic mutation reduces the nicotine level of the tobacco plant to below 1%, below 2%, below 5%, below 8%, below 10%, below 12%, below 15%, below 20%, below 25%, below 30%, below 40%, below 50%, below 60%, below 70%, or below 80% of the nicotine level of a control plant when grown in similar growth conditions, wherein the tobacco plant is capable of producing leaves having a USDA grade index value comparable to the USDA grade index value of the control plant, and wherein the control plant shares an essentially identical genetic background with the tobacco plant except the non-transgenic mutation.

[0068] In some aspects, the present disclosure provides tobacco plants, or part thereof, comprising a mutation in Nic1 locus, wherein the mutation is absent from LA Burley 21. In some aspects, tobacco plants provided herein comprise a shorter chromosome deletion at Nic1 locus compared to LA Burley 21. In other aspects, tobacco plants provided herein comprise no deletion of a complete gene or a complete genic coding sequence in Nic1 locus. In some aspects, tobacco plants provided herein are homozygous at Nic1 locus. In other aspects, tobacco plants provided herein are heterozygous at Nic1 locus. In some aspects, tobacco plants provided herein comprise a Nic1 mutation selected from the group consisting of a point mutation, a deletion, an insertion, a duplication, and an inversion. In some aspects, Nic1 mutations in the tobacco plants provided herein are introduced by an approach selected from the group consisting of random mutagenesis and targeted mutagenesis. In other aspects, Nic1 mutations in the tobacco plants provided herein are introduced by a targeted mutagenesis approach selected from the group consisting of meganuclease, zinc finger nuclease, TALEN, and CRISPR.

[0069] In some aspects, tobacco plants provided herein comprise one or more mutations within one or more genes comprising a sequence having at least 80%, at least 85%, at least 90%, at least 95%, at least 97%, at least 98%, at least 99%, or 100% identity to a sequence selected from the group consisting of SEQ ID NOs: 9 to 28, 75 to 82, 86 to 100, 145, and fragments thereof. In some aspects, one or more mutations reduce the expression or activity of one or more genes comprising a sequence having at least 80%, at least 85%, at least 90%, at least 95%, at least 97%, at least 98%, at least 99%, or 100% identity to a sequence selected from the group consisting of SEQ ID NOs: 9 to 28, 75 to 82, 86 to 100, 145, and fragments thereof.

[0070] In some aspects, tobacco plants provided herein comprise one or more mutations within one or more genes comprising a coding sequence having at least 80%, at least 85%, at least 90%, at least 95%, at least 97%, at least 98%, at least 99%, or 100% identity to a sequence selected from the group consisting of SEQ ID NOs: 29 to 48, 83, 101 to 115, 146, and fragments thereof. In some aspects, one or more mutations reduce the expression or activity of one or more genes comprising a coding sequence having at least 80%, at least 85%, at least 90%, at least 95%, at least 97%, at least 98%, at least 99%, or 100% identity to a sequence selected from the group consisting of SEQ ID NOs: 29 to 48, 83, 101 to 115, 146, and fragments thereof.

[0071] In some aspects, tobacco plants provided herein comprise one or more mutations within one or more genes encoding a polypeptide having at least 80%, at least 85%, at least 90%, at least 95%, at least 97%, at least 98%, at least 99%, or 100% identity to a sequence selected from the group consisting of SEQ ID NOs: 49 to 68, 84, 116 to 130, 147and fragments thereof. In some aspects, one or more mutations reduce the expression or activity of one or more genes encoding a polypeptide having at least 80%, at least 85%, at least 90%, at least 95%, at least 97%, at least 98%, at least 99%, or 100% identity to a sequence selected from the group consisting of SEQ ID NOs: 49 to 68, 84, 116 to 130, 147and fragments thereof.

[0072] In some aspects, tobacco plants provided herein comprise one or more mutations within one or more genes comprising a sequence having at least 80%, at least 85%, at least 90%, at least 95%, at least 97%, at least 98%, at least 99%, or 100% identity to a sequence selected from the group consisting of SEQ ID NOs: 13, 28, 33, 48, 82, 86, 87, 101, 102, 145, and 146, and fragments thereof. In some aspects, one or more mutations reduce the expression or activity of one or more genes comprising a sequence having at least 80%, at least 85%, at least 90%, at least 95%, at least 97%, at least 98%, at least 99%, or 100% identity to a sequence selected from the group consisting of SEQ ID NOs: 13, 28, 33, 48, 82, 86, 87, 101, 102, 145, and 146, and fragments thereof.

[0073] In some aspects, tobacco plants provided herein comprise one or more mutations within one or more genes comprising a coding sequence having at least 80%, at least 85%, at least 90%, at least 95%, at least 97%, at least 98%, at least 99%, or 100% identity to a sequence selected from the group consisting of SEQ ID NOs: 33, 48, 101, 102, and 146, and fragments thereof. In some aspects, one or more mutations reduce the expression or activity of one or more genes comprising a coding sequence having at least 80%, at least 85%, at least 90%, at least 95%, at least 97%, at least 98%, at least 99%, or 100% identity to a sequence selected from the group consisting of SEQ ID NOs: 33, 48, 101, 102, and 146, and fragments thereof.

[0074] In some aspects, tobacco plants provided herein comprise one or more mutations within one or more genes encoding a polypeptide having at least 80%, at least 85%, at least 90%, at least 95%, at least 97%, at least 98%, at least 99%, or 100% identity to a sequence selected from the group consisting of SEQ ID NOs: 53, 68, 116, 117, and 147, and fragments thereof. In some aspects, one or more mutations reduce the expression or activity of one or more genes encoding a polypeptide having at least 80%, at least 85%, at least 90%, at least 95%, at least 97%, at least 98%, at least 99%, or 100% identity to a sequence selected from the group consisting of SEQ ID NOs: 53, 68, 116, 117, and 147, and fragments thereof.

[0075] LA Burley 21 is a low total alkaloid tobacco line produced by incorporation of a low alkaloid gene(s) from a Cuban cigar variety into Burley 21 through several backcrosses (Legg et al. 1970). It has approximately 0.2% total alkaloids (dry weight) compared to the about 3.5% (dry weight) of its parent, Burley 21. LA BU21 has a leaf grade well below commercially acceptable standards.

[0076] Unless specified otherwise, measurements of alkaloid or nicotine levels or leaf grade index values mentioned herein for a tobacco plant, variety, cultivar, or line refer to average measurements, including, for example, an average of multiple leaves of a single plant or an average measurement from a population of tobacco plants from a single variety, cultivar, or line. A population of tobacco plants or a collection of tobacco leaves for determining an average measurement (e.g., alkaloid or nicotine level or leaf grading) can be of any size, for example, 5, 10, 15, 20, 25, 30, 35, 40, or 50. Industry-accepted standard protocols are followed for determining average measurements or grad index values.

[0077] As used herein, “similar growth conditions” refer to similar environmental conditions and/or agronomic practices for growing and making meaningful comparisons between two or more plant genotypes so that neither environmental conditions nor agronomic practices would contribute to or explain any difference observed between the two or more plant genotypes. Environmental conditions include, for example, light, temperature, water (humidity), and nutrition (e.g., nitrogen and phosphorus). Agronomic practices include, for example, seeding, clipping, undercutting, transplanting, topping, and suckering. See Chapters 4B and 4C of Tobacco, Production, Chemistry and Technology, Davis & Nielsen, eds., Blackwell Publishing, Oxford (1999), pp 70-103.

[0078] “Alkaloids” are complex, nitrogen-containing compounds that naturally occur in plants, and have pharmacological effects in humans and animals. “Nicotine” is the primary natural alkaloid in commercialized cigarette tobacco and accounts for about 90 percent of the alkaloid content in Nicotiana tabacum. Other major alkaloids in tobacco include cotinine, nornicotine, myosmine, nicotyrine, anabasine and anatabine. Minor tobacco alkaloids include nicotine-n-oxide, N-methyl anatabine, N-methyl anabasine, pseudooxynicotine, 2,3 dipyridyl and others.

[0079] In some aspects, tobacco plants provided herein comprise a lower level of total alkaloid or an individual alkaloid compared to a control tobacco plant without a Nic1 mutation when grown in similar growth conditions. In other aspects, tobacco plants provided herein comprise a lower level of one or more alkaloids selected from the group consisting of cotinine, nornicotine, myosmine, nicotyrine, anabasine and anatabine, compared to a control tobacco plant when grown in similar growth conditions. In some aspects, a lower alkaloid level refers to an alkaloid level of below 1%, below 2%, below 5%, below 8%, below 10%, below 12%, below 15%, below 20%, below 25%, below 30%, below 40%, below 50%, below 60%, below 70%, or below 80% of the alkaloid level of a control tobacco plant. In other aspects, a lower alkaloid level refers to an alkaloid level of about between 0.5% and 1%, between 1% and 2%, between 2% and 3%, between 3% and 4%, between 4% and 5%, between 5% and 6%, between 6% and 7%, between 7% and 8%, between 8% and 9%, between 9% and 10%, between 11% and 12%, between 12% and 13%, between 13% and 14%, between 14% and 15%, between 15% and 16%, between 16% and 17%, between 17% and 18%, between 18% and 19%, between 19% and 20%, between 21% and 22%, between 22% and 23%, between 23% and 24%, between 24% and 25%, between 25% and 26%, between 26% and 27%, between 27% and 28%, between 28% and 29%, or between 29% and 30% of the alkaloid level of a control tobacco plant. In further aspects, a lower alkaloid level refers to an alkaloid level of about between 0.5% and 5%, between 5% and 10%, between 10% and 20%, between 20% and 30% of the alkaloid level of a control tobacco plant.

[0080] Alkaloid levels can be assayed by methods known in the art, for example by quantification based on gas-liquid chromatography, high performance liquid chromatography, radio-immunoassays, and enzyme-linked immunosorbent assays. For example, nicotinic alkaloid levels can be measured by a GC-FID method based on CORESTA Recommended Method No. 7, 1987 and ISO Standards (ISO TC 126N 394 E. See also Hibi et al., Plant Physiology 100: 826-35 (1992) for a method using gas-liquid chromatography equipped with a capillary column and an FID detector.

[0081] Alternatively, tobacco total alkaloids can be measured using a segmented-flow colorimetric method developed for analysis of tobacco samples as adapted by Skalar Instrument Co (West Chester, Pa.) and described by Collins et al., Tobacco Science 13:79-81 (1969). In short, samples of tobacco are dried, ground, and extracted prior to analysis of total alkaloids and reducing sugars. The method then employs an acetic acid/methanol/water extraction and charcoal for decolorization. Determination of total alkaloids was based on the reaction of cyanogen chloride with nicotine alkaloids in the presence of an aromatic amine to form a colored complex which is measured at 460 nm. Unless specified otherwise, total alkaloid levels or nicotine levels shown herein are on a dry weight basis (e.g., percent total alkaloid or percent nicotine).

[0082] In some aspects, tobacco plants provided herein comprise a lower level of nicotine compared to a control tobacco plant without a Nic1 mutation when grown in similar growth conditions. In some aspects, a lower nicotine level refers to an average nicotine level of below 1%, below 2%, below 5%, below 8%, below 10%, below 12%, below 15%, below 20%, below 25%, below 30%, below 40%, below 50%, below 60%, below 70%, or below 80% of the average nicotine level of a control tobacco plant. In other aspects, a lower nicotine level refers to an average nicotine level of about between 0.5% and 1%, between 1% and 2%, between 2% and 3%, between 3% and 4%, between 4% and 5%, between 5% and 6%, between 6% and 7%, between 7% and 8%, between 8% and 9%, between 9% and 10%, between 11% and 12%, between 12% and 13%, between 13% and 14%, between 14% and 15%, between 15% and 16%, between 16% and 17%, between 17% and 18%, between 18% and 19%, between 19% and 20%, between 21% and 22%, between 22% and 23%, between 23% and 24%, between 24% and 25%, between 25% and 26%, between 26% and 27%, between 27% and 28%, between 28% and 29%, or between 29% and 30% of the average nicotine level of a control tobacco plant. In further aspects, a lower nicotine level refers to an average nicotine level of about between 0.5% and 5%, between 5% and 10%, between 10% and 20%, between 20% and 30% of the average nicotine level of a control tobacco plant.

[0083] In some aspects, tobacco plants provided herein comprise an average nicotine level selected from the group consisting of about 0.01%, 0.02%, 0.05%, 0.75%, 0.1%, 0.15%, 0.2%, 0.3%, 0.35%, 0.4%, 0.5%, 0.6%, 0.7%, 0.8%, 0.9%, 1%, 1.1%, 1.2%, 1.3%, 1.4%, 1.5%, 1.6%, 1.7%, 1.8%, 1.9%, 2%, 2.1%, 2.2%, 2.3%, 2.4%, 2.5%, 2.6%, 2.7%, 2.8%, 2.9%, 3%, 3.1%, 3.2%, 3.3%, 3.4%, 3.5%, 3.6%, 3.7%, 3.8%, 3.9%, 4%, 5%, 6%, 7%, 8%, and 9% on a dry weight basis. In other aspects, tobacco plants provided herein comprise an average nicotine level selected from the group consisting of about between 0.01% and 0.02%, between 0.02% and 0.05%, between 0.05% and 0.75%, between 0.75% and 0.1%, between 0.1% and 0.15%, between 0.15% and 0.2%, between 0.2% and 0.3%, between 0.3% and 0.35%, between 0.35% and 0.4%, between 0.4% and 0.5%, between 0.5% and 0.6%, between 0.6% and 0.7%, between 0.7% and 0.8%, between 0.8% and 0.9%, between 0.9% and 1%, between 1% and 1.1%, between 1.1% and 1.2%, between 1.2% and 1.3%, between 1.3% and 1.4%, between 1.4% and 1.5%, between 1.5% and 1.6%, between 1.6% and 1.7%, between 1.7% and 1.8%, between 1.8% and 1.9%, between 1.9% and 2%, between 2% and 2.1%, between 2.1% and 2.2%, between 2.2% and 2.3%, between 2.3% and 2.4%, between 2.4% and 2.5%, between 2.5% and 2.6%, between 2.6% and 2.7%, between 2.7% and 2.8%, between 2.8% and 2.9%, between 2.9% and 3%, between 3% and 3.1%, between 3.1% and 3.2%, between 3.2% and 3.3%, between 3.3% and 3.4%, between 3.4% and 3.5%, and between 3.5% and 3.6% on a dry weight basis. In further aspects, tobacco plants provided herein comprise an average nicotine level selected from the group consisting of about between 0.01% and 0.1%, between 0.02% and 0.2%, between 0.03% and 0.3%, between 0.04% and 0.4%, between 0.05% and 0.5%, between 0.75% and 1%, between 0.1% and 1.5%, between 0.15% and 2%, between 0.2% and 3%, and between 0.3% and 3.5% on a dry weight basis.

[0084] The present disclosure also provides tobacco plants having altered nicotine levels without negative impacts over other tobacco traits, e.g., leaf grade index value. In one aspect, a low-nicotine or nicotine-free tobacco variety disclosed herein provides cured tobacco of commercially acceptable grade. Tobacco grades are evaluated based on factors including, but not limited to, the leaf stalk position, leaf size, leaf color, leaf uniformity and integrity, ripeness, texture, elasticity, sheen (related with the intensity and the depth of coloration of the leaf as well as the shine), hygroscopicity (the faculty of the tobacco leaves to absorb and to retain the ambient moisture), and green nuance or cast. Leaf grade can be determined, for example, using an Official Standard Grade published by the Agricultural Marketing Service of the US Department of Agriculture (7 U.S.C. §511). See, e.g., Official Standard Grades for Burley Tobacco (U.S. Type 31 and Foreign Type 93), effective Nov. 5, 1990 (55 F.R. 40645); Official Standard Grades for Flue-Cured Tobacco (U.S. Types 11, 12, 13, 14 and Foreign Type 92), effective Mar. 27, 1989 (54 F.R. 7925); Official Standard Grades for Pennsylvania Seedleaf Tobacco (U.S. Type 41), effective Jan. 8, 1965 (29 F.R. 16854); Official Standard Grades for Ohio Cigar-Leaf Tobacco (U.S. Types 42, 43, and 44), effective Dec. 8, 1963 (28 F.R. 11719 and 28 F.R. 11926); Official Standard Grades for Wisconsin Cigar-Binder Tobacco (U.S. Types 54 and 55), effective Nov. 20, 1969 (34 F.R. 17061); Official Standard Grades for Wisconsin Cigar-Binder Tobacco (U.S. Types 54 and 55), effective Nov. 20, 1969 (34 F.R. 17061); Official Standard Grades for Georgia and Florida Shade-Grown Cigar-Wrapper Tobacco (U.S. Type 62), Effective April 1971. A USDA grade index value can be determined according to an industry accepted grade index. See, e.g., Bowman et al, Tobacco Science, 32:39-40(1988); Legacy Tobacco Document Library (Bates Document #523267826-523267833, Jul. 1, 1988, Memorandum on the Proposed Burley Tobacco Grade Index); and Miller et al., 1990, Tobacco Intern., 192:55-57 (all foregoing references are incorporated by inference in their entirety). In one aspect, a USDA grade index is a 0-100 numerical representation of federal grade received and is a weighted average of all stalk positions. A higher grade index indicates higher quality. Alternatively, leaf grade can be determined via hyper-spectral imaging. See e.g., WO 2011/027315 (published on Mar. 10, 2011, and incorporated by inference in its entirety).

[0085] In some aspects, tobacco plants provided herein comprise a similar level of one or more tobacco aroma compounds selected from the group consisting of 3-methylvaleric acid, valeric acid, isovaleric acid, a labdenoid, a cembrenoid, a sugar ester, and a reducing sugar, compared to control tobacco plants when grown in similar growth conditions. In other aspects, tobacco plants provided herein comprise a Nic1 mutation, a Nic2 mutation, or a combination thereof having no impact over the level of one or more tobacco aroma compounds selected from the group consisting of 3-methylvaleric acid, valeric acid, isovaleric acid, a labdenoid, a cembrenoid, a sugar ester, and a reducing sugar.

[0086] As used herein, tobacco aroma compounds are compounds associated with the flavor and aroma of tobacco smoke. These compounds include, but are not limited to, 3-methylvaleric acid, valeric acid, isovaleric acid, cembrenoid and labdenoid diterpenes, and sugar esters. Concentrations of tobacco aroma compounds can be measured by any known metabolite profiling methods in the art including, without limitation, gas chromatography mass spectrometry (GC-MS), Nuclear Magnetic Resonance Spectroscopy, liquid chromatography-linked mass spectrometry. See The Handbook of Plant Metabolomics, edited by Weckwerth and Kahl, (Wiley-Blackwell) (May 28, 2013).

[0087] As used herein, “reducing sugar(s)” are any sugar (monosaccharide or polysaccharide) that has a free or potentially free aldehdye or ketone group. Glucose and fructose act as nicotine buffers in cigarette smoke by reducing smoke pH and effectively reducing the amount of “free” unprotonated nicotine. Reducing sugars balances smoke flavor, for example, by modifying the sensory impact of nicotine and other tobacco alkaloids. An inverse relationship between sugar content and alkaloid content has been reported across tobacco varieties, within the same variety, and within the same plant line caused by planting conditions. Reducing sugar levels can be measured using a segmented-flow colorimetric method developed for analysis of tobacco samples as adapted by Skalar Instrument Co (West Chester, Pa.) and described by Davis, Tobacco Science 20:139-144 (1976). For example, a sample is dialyzed against a sodium carbonate solution. Copper neocuproin is added to the sample and the solution is heated. The copper neocuproin chelate is reduced in the presence of sugars resulting in a colored complex which is measured at 460 nm.

[0088] In some aspects, tobacco plants provided herein comprise one or more non-naturally existing mutant alleles at Nic1 or Nic2 locus which reduce or eliminate one or more gene activity from Nic1 or Nic2 locus. In some aspects, these mutant alleles result in lower nicotine levels. Mutant Nic1 or Nic2 alleles can be introduced by any method known in the art including random or targeted mutagenesis approaches.

[0089] Such mutagenesis methods include, without limitation, treatment of seeds with ethyl methylsulfate (EMS) (Hildering and Verkerk, In, The use of induced mutations in plant breeding. Pergamon press, pp 317-320, 1965) or UV-irradiation, X-rays, and fast neutron irradiation (see, for example, Verkerk, Neth. J. Agric. Sci. 19:197-203, 1971; and Poehlman, Breeding Field Crops, Van Nostrand Reinhold, New York (3.sup.rd ed), 1987), transposon tagging (Fedoroff et al., 1984; U.S. Pat. No. 4,732,856 and U.S. Pat. No. 5,013,658), as well as T-DNA insertion methodologies (Hoekema et al., 1983; U.S. Pat. No. 5,149,645). EMS-induced mutagenesis consists of chemically inducing random point mutations over the length of the genome. Fast neutron mutagenesis consists of exposing seeds to neutron bombardment which causes large deletions through double stranded DNA breakage. Transposon tagging comprises inserting a transposon within an endogenous gene to reduce or eliminate expression of the gene. The types of mutations that may be present in a tobacco gene include, for example, point mutations, deletions, insertions, duplications, and inversions. Such mutations desirably are present in the coding region of a tobacco gene; however mutations in the promoter region, and intron, or an untranslated region of a tobacco gene may also be desirable.

[0090] In addition, a fast and automatable method for screening for chemically induced mutations, TILLING (Targeting Induced Local Lesions In Genomes), using denaturing

[0091] HPLC or selective endonuclease digestion of selected PCR products is also applicable to the present disclosure. See, McCallum et al. (2000) Nat. Biotechnol. 18:455-457. Mutations that impact gene expression or that interfere with the function of genes disclosed herein can be determined using methods that are well known in the art. Insertional mutations in gene exons usually result in null-mutants. Mutations in conserved residues can be particularly effective in inhibiting the function of a protein. In some aspects, tobacco plants disclosed herein comprise a nonsense (e.g., stop codon) mutation is one or more Nic1 genes described herein.

[0092] Is some aspects, the present disclosure also provides tobacco lines with altered nicotine levels while maintaining commercially acceptable leaf quality. These lines can be produced by introducing mutations into one or more genes at Nic1 or Nic2 locus via precise genome engineering technologies, for example, Transcription activator-like effector nucleases (TALENs), meganuclease, zinc finger nuclease, and a clustered regularly-interspaced short palindromic repeats (CRISPR)/Cas9 system, a CRISPR/Cpfl system, a CRISPR/Csm1 system, and a combination thereof (see, for example, U.S. Patent Application publication 2017/0233756). See, e.g., Gaj et al., Trends in Biotechnology, 31(7):397-405 (2013).

[0093] The screening and selection of mutagenized tobacco plants can be through any methodologies known to those having ordinary skill in the art. Examples of screening and selection methodologies include, but are not limited to, Southern analysis, PCR amplification for detection of a polynucleotide, Northern blots, RNase protection, primer-extension, RT-PCR amplification for detecting RNA transcripts, Sanger sequencing, Next Generation sequencing technologies (e.g., Illumina, PacBio, Ion Torrent, 454), enzymatic assays for detecting enzyme or ribozyme activity of polypeptides and polynucleotides, and protein gel electrophoresis, Western blots, immunoprecipitation, and enzyme-linked immunoassays to detect polypeptides. Other techniques such as in situ hybridization, enzyme staining, and immunostaining also can be used to detect the presence or expression of polypeptides and/or polynucleotides. Methods for performing all of the referenced techniques are known.

[0094] In an aspect, a tobacco plant or plant genome provided herein is mutated or edited by a nuclease selected from the group consisting of a meganuclease, a zinc-finger nuclease (ZFN), a transcription activator-like effector nuclease (TALEN), a CRISPR/Cas9 nuclease, a CRISPR/Cpf1 nuclease, or a CRISPR/Csm1 nuclease.

[0095] Meganucleases, ZFNs, TALENs, CRISPR/Cas9, CRISPR/Csm1 and CRISPR/Cpf1 induce a double-strand DNA break at a target site of a genomic sequence that is then repaired by the natural processes of homologous recombination (HR) or non-homologous end-joining (NHEJ). Sequence modifications then occur at the cleaved sites, which can include deletions or insertions that result in gene disruption in the case of NHEJ, or integration of donor nucleic acid sequences by HR. In an aspect, a method provided herein comprises editing a plant genome with a nuclease provided herein to mutate at least 1, at least 2, at least 3, at least 4, at least 5, at least 6, at least 7, at least 8, at least 9, at least 10, or more than 10 nucleotides in the plant genome via HR with a donor polynucleotide. In an aspect, a mutation provided herein is caused by genome editing using a nuclease. In another aspect, a mutation provided herein is caused by non-homologous end-joining or homologous recombination.

[0096] In an aspect, a mutation provided herein provides a dominant mutant that activates the expression or activity of a gene of interest, e.g., a gene selected from the group consisting of a biosynthetic enzyme, a regulatory transcription factor, a transporter, a catabolic enzyme, or a combination thereof, for one or more antioxidants.

[0097] Meganucleases, which are commonly identified in microbes, are unique enzymes with high activity and long recognition sequences (>14 bp) resulting in site-specific digestion of target DNA. Engineered versions of naturally occurring meganucleases typically have extended DNA recognition sequences (for example, 14 to 40 bp). The engineering of meganucleases can be more challenging than that of ZFNs and TALENs because the DNA recognition and cleavage functions of meganucleases are intertwined in a single domain. Specialized methods of mutagenesis and high-throughput screening have been used to create novel meganuclease variants that recognize unique sequences and possess improved nuclease activity.

[0098] ZFNs are synthetic proteins consisting of an engineered zinc finger DNA-binding domain fused to the cleavage domain of the Fokl restriction endonuclease. ZFNs can be designed to cleave almost any long stretch of double-stranded DNA for modification of the zinc finger DNA-binding domain. ZFNs form dimers from monomers composed of a non-specific DNA cleavage domain of Fokl endonuclease fused to a zinc finger array engineered to bind a target DNA sequence.

[0099] The DNA-binding domain of a ZFN is typically composed of 3-4 zinc-finger arrays. The amino acids at positions −1, +2, +3, and +6 relative to the start of the zinc finger ∞-helix, which contribute to site-specific binding to the target DNA, can be changed and customized to fit specific target sequences. The other amino acids form the consensus backbone to generate ZFNs with different sequence specificities. Rules for selecting target sequences for ZFNs are known in the art.

[0100] The Fokl nuclease domain requires dimerization to cleave DNA and therefore two ZFNs with their C-terminal regions are needed to bind opposite DNA strands of the cleavage site (separated by 5-7 bp). The ZFN monomer can cute the target site if the two-ZF-binding sites are palindromic. The term ZFN, as used herein, is broad and includes a monomeric ZFN that can cleave double stranded DNA without assistance from another ZFN. The term ZFN is also used to refer to one or both members of a pair of ZFNs that are engineered to work together to cleave DNA at the same site.

[0101] Without being limited by any scientific theory, because the DNA-binding specificities of zinc finger domains can in principle be re-engineered using one of various methods, customized ZFNs can theoretically be constructed to target nearly any gene sequence. Publicly available methods for engineering zinc finger domains include Context-dependent Assembly (CoDA), Oligomerized Pool Engineering (OPEN), and Modular Assembly.

[0102] TALENs are artificial restriction enzymes generated by fusing the transcription activator-like effector (TALE) DNA binding domain to a Fokl nuclease domain. When each member of a TALEN pair binds to the DNA sites flanking a target site, the Fokl monomers dimerize and cause a double-stranded DNA break at the target site. The term TALEN, as used herein, is broad and includes a monomeric TALEN that can cleave double stranded DNA without assistance from another TALEN. The term TALEN is also used to refer to one or both members of a pair of TALENs that work together to cleave DNA at the same site.

[0103] Transcription activator-like effectors (TALEs) can be engineered to bind practically any DNA sequence. TALE proteins are DNA-binding domains derived from various plant bacterial pathogens of the genus Xanthomonas. The X pathogens secrete TALEs into the host plant cell during infection. The TALE moves to the nucleus, where it recognizes and binds to a specific DNA sequence in the promoter region of a specific DNA sequence in the promoter region of a specific gene in the host genome. TALE has a central DNA-binding domain composed of 13-28 repeat monomers of 33-34 amino acids. The amino acids of each monomer are highly conserved, except for hypervariable amino acid residues at positions 12 and 13. The two variable amino acids are called repeat-variable diresidues (RVDs). The amino acid pairs NI, NG, HD, and NN of RVDs preferentially recognize adenine, thymine, cytosine, and guanine/adenine, respectively, and modulation of RVDs can recognize consecutive DNA bases. This simple relationship between amino acid sequence and DNA recognition has allowed for the engineering of specific DNA binding domains by selecting a combination of repeat segments containing the appropriate RVDs.

[0104] Besides the wild-type Fokl cleavage domain, variants of the Fokl cleavage domain with mutations have been designed to improve cleavage specificity and cleavage activity. The Fokl domain functions as a dimer, requiring two constructs with unique DNA binding domains for sites in the target genome with proper orientation and spacing. Both the number of amino acid residues between the TALEN DNA binding domain and the Fokl cleavage domain and the number of bases between the two individual TALEN binding sites are parameters for achieving high levels of activity.

[0105] A relationship between amino acid sequence and DNA recognition of the TALE binding domain allows for designable proteins. Software programs such as DNA Works can be used to design TALE constructs. Other methods of designing TALE constructs are known to those of skill in the art. See Doyle et al,. Nucleic Acids Research (2012) 40: W117-122.; Cermak et al., Nucleic Acids Research (2011). 39:e82; and tale-nt.cac.cornell.edu/about.

[0106] A CRISPR/Cas9 system, CRISPR/Csm1, or a CRISPR/Cpf1 system are alternatives to the Fokl-based methods ZFN and TALEN. The CRISPR systems are based on RNA-guided engineered nucleases that use complementary base pairing to recognize DNA sequences at target sites.

[0107] CRISPR/Cas9, CRISPR/Csm1, and a CRISPR/Cpf1 systems are part of the adaptive immune system of bacteria and archaea, protecting them against invading nucleic acids such as viruses by cleaving the foreign DNA in a sequence-dependent manner. The immunity is acquired by the integration of short fragments of the invading DNA known as spacers between two adjacent repeats at the proximal end of a CRISPR locus. The CRISPR arrays, including the spacers, are transcribed during subsequent encounters with invasive DNA and are processed into small interfering CRISPR RNAs (crRNAs) approximately 40 nt in length, which combine with the trans-activating CRISPR RNA (tracrRNA) to activate and guide the Cas9 nuclease. This cleaves homologous double-stranded DNA sequences known as protospacers in the invading DNA. A prerequisite for cleavage is the presence of a conserved protospacer-adjacent motif (PAM) downstream of the target DNA, which usually has the sequence 5-NGG-3 but less frequently NAG. Specificity is provided by the so-called “seed sequence” approximately 12 bases upstream of the PAM, which must match between the RNA and target DNA. Cpfl acts in a similar manner to Cas9, but Cpf1 does not require a tracrRNA.

[0108] In still another aspect, a tobacco plant provided herein further comprises one or more mutations in one or more loci encoding a nicotine demethylase (e.g., CYP82E4, CYP82E5, CYP82E10) that confer reduced amounts of nornicotine (See U.S. Pat. Nos. 8,319,011; 8,124,851; 9,187,759; 9,228,194; 9,228,195; 9,247,706) compared to control plant lacking one or more mutations in one or more loci encoding a nicotine demethylase. In an aspect, a modified tobacco plant described herein further comprises reduced nicotine demethylase activity compared to a control plant when grown and cured under comparable conditions.

[0109] The present disclosure also provides compositions and methods for inhibiting the expression or function of one or more polypeptides from Nic1 locus in a plant, particularly plants of the Nicotiana genus, including tobacco plants of the various commercial varieties.

[0110] In some aspects, the present disclosure provides tobacco plants, or part thereof, comprising a heterologous expression cassette comprising a Nic1 inhibitory sequence of a gene comprising a sequence having at least 80%, at least 85%, at least 90%, at least 95%, at least 97%, at least 98%, at least 99%, or 100% identity to a sequence selected from the group consisting of SEQ ID NOs: 9 to 28, 75 to 82, 86 to 100, 145, and fragments thereof, wherein the inhibitory sequence is operably linked to a promoter that is functional in a plant cell, and wherein the inhibitory sequence has at least 90% sequence identity to a fragment of at least 21, 22, 23, 24, 25, 26, 27, 28, 29, 30, 31, 32, 33, 34, 35, 36, 37, 38, 39, 40, 41, 42, 43, 44, 45, 46, 47, 48, 49, 50, 51, 52, 53, 54, 55, 56, 57, 58, 59, 60, 61, 62, 63, 64, 65, 66, 67, 68, 69, 70, 71,72, 73, 74, 75, 76, 77, 78, 79, or 80 nucleotides of the sequence having at least 80%, at least 85%, at least 90%, at least 95%, at least 97%, at least 98%, at least 99%, or 100% identity to a sequence selected from the group consisting of SEQ ID NOs: 9 to 28, 75 to 82, 86 to 100, 145, and fragments thereof. In other aspects, the present disclosure provides tobacco plants, or part thereof, comprising a heterologous expression cassette comprising a Nic1 inhibitory sequence of a gene comprising a sequence having at least 80%, at least 85%, at least 90%, at least 95%, at least 97%, at least 98%, at least 99%, or 100% identity to a sequence selected from the group consisting of SEQ ID NOs: 13, 28, 33, 48, 82, 86, 87, 101, 102, 145, and 146, and fragments thereof, wherein the inhibitory sequence is operably linked to a promoter that is functional in a plant cell, and wherein the inhibitory sequence has at least 90% sequence identity to a fragment of at least 21, 22, 23, 24, 25, 26, 27, 28, 29, 30, 31, 32, 33, 34, 35, 36, 37, 38, 39, 40, 41, 42, 43, 44, 45, 46, 47, 48, 49, 50, 51, 52, 53, 54, 55, 56, 57, 58, 59, 60, 61, 62, 63, 64, 65, 66, 67, 68, 69, 70, 71,72, 73, 74, 75, 76, 77, 78, 79, or 80 nucleotides of the sequence having at least 80%, at least 85%, at least 90%, at least 95%, at least 97%, at least 98%, at least 99%, or 100% identity to a sequence selected from the group consisting of SEQ ID NOs: 13, 28, 33, 48, 82, 86, 87, 101, 102, 145, and 146, and fragments thereof. In some aspects, a Nic1 inhibitory sequence is capable of being transcribed as an inhibitory polynucleotide selected from the group consisting of a single-stranded RNA polynucleotide, a double-stranded RNA polynucleotide, and a combination thereof.

[0111] As used herein, the terms “inhibit,” “inhibition,” and “inhibiting” are defined as any method known in the art or described herein that decreases the expression or function of a gene product of interest (e.g., a target gene product). “Inhibition” can be in the context of a comparison between two plants, for example, a genetically altered plant versus a wild-type plant. Alternatively, inhibition of expression or function of a target gene product can be in the context of a comparison between plant cells, organelles, organs, tissues, or plant parts within the same plant or between different plants, and includes comparisons between developmental or temporal stages within the same plant or plant part or between plants or plant parts. “Inhibition” includes any relative decrement of function or production of a gene product of interest, up to and including complete elimination of function or production of that gene product. The term “inhibition” encompasses any method or composition that down-regulates and/or transcription of the target gene product or functional activity of the target gene product. In some aspects, the mRNA or protein level of one or more genes from Nic1 locus in a modified plant disclsosed herein is less than 95%, less than 90%, less than 80%, less than 70%, less than 60%, less than 50%, less than 40%, less than 30%, less than 20%, less than 10%, less than 5%, less than 4%, less than 3%, less than 2%, or less than 1% of the protein level of the same gene in a plant that is not a mutant or that has not been genetically modified to inhibit the expression of that gene.

[0112] The term “inhibitory sequence” encompasses any polynucleotide or polypeptide sequence capable of inhibiting the expression or function of a gene involved in nicotine biosynthesis regulation from Nic1 locus in a plant, such as full-length polynucleotide or polypeptide sequences, truncated polynucleotide or polypeptide sequences, fragments of polynucleotide or polypeptide sequences, variants of polynucleotide or polypeptide sequences, sense-oriented nucleotide sequences, antisense-oriented nucleotide sequences, the complement of a sense- or antisense-oriented nucleotide sequence, inverted regions of nucleotide sequences, hairpins of nucleotide sequences, double-stranded nucleotide sequences, single-stranded nucleotide sequences, combinations thereof, and the like. The term “polynucleotide sequence” includes sequences of RNA, DNA, chemically modified nucleic acids, nucleic acid analogs, combinations thereof, and the like.

[0113] Inhibitory sequences are designated herein by the name of the target gene product. Thus, a “Nic1 inhibitory sequence” refers to an inhibitory sequence that is capable of inhibiting the expression of a gene involved in nicotine biosynthesis regulation from Nic1 locus in a plant, for example, at the level of transcription and/or translation, or which is capable of inhibiting the function of a gene product. When the phrase “capable of inhibiting” is used in the context of a polynucleotide inhibitory sequence, it is intended to mean that the inhibitory sequence itself exerts the inhibitory effect; or, where the inhibitory sequence encodes an inhibitory nucleotide molecule (for example, hairpin RNA, miRNA, or double-stranded RNA polynucleotides), or encodes an inhibitory polypeptide (e.g., a polypeptide that inhibits expression or function of the target gene product), following its transcription (for example, in the case of an inhibitory sequence encoding a hairpin RNA, miRNA, or double-stranded RNA polynucleotide) or its transcription and translation (in the case of an inhibitory sequence encoding an inhibitory polypeptide), the transcribed or translated product, respectively, exerts the inhibitory effect on the target gene product (e.g., inhibits expression or function of the target gene product).

[0114] A Nic1 inhibitory sequence disclosed herein can be a sequence triggering gene silencing via any silencing pathway or mechanism known in the art, including, but not limited to, sense suppression/cosuppression, antisense suppression, double-stranded RNA (dsRNA) interference, hairpin RNA interference and intron-containing hairpin RNA interference, amplicon-mediated interference, ribozymes, small interfering RNA, artificial or synthetic microRNA, and artificial trans-acting siRNA. A Nic1 inhibitory sequence may range from at least about 20 nucleotides, about 50 nucleotides, about 70 nucleotides, about 100 nucleotides, about 150 nucleotides, about 200 nucleotides, about 250 nucleotides, about 300 nucleotides, about 350 nucleotides, about 400 nucleotides, and up to the full-length polynucleotide encoding the proteins of the present disclosure, depending upon the desired outcome. In one aspect, a Nic1 inhibitory sequence can be a fragment of between about 50 and about 400 nucleotides, between about 70 and about 350 nucleotides, between about 90 and about 325 nucleotides, between about 90 and about 300 nucleotides, between about 90 and about 275 nucleotides, between about 100 and about 400 nucleotides, between about 100 and about 350 nucleotides, between about 100 and about 325 nucleotides, between about 100 and about 300 nucleotides, between about 125 and about 300 nucleotides, or between about 125 and about 275 nucleotides in length. In some embodiments, a fragment of a cytochrome P450 polynucleotide is about 50, about 60, about 70, about 80, about 90, about 100, about 125, about 150, about 175, about 200, about 225, about 250, about 275, about 300, about 325, about 350, about 400 nucleotides in length, and other such values between about 70 and about 400 nucleotides.

[0115] The use of the term “polynucleotide” is not intended to limit the present disclosure to polynucleotides comprising DNA. Those of ordinary skill in the art will recognize that polynucleotides can comprise ribonucleotides and combinations of ribonucleotides and deoxyribonucleotides. Such deoxyribonucleotides and ribonucleotides include both naturally occurring molecules and synthetic analogues. The polynucleotides of the present disclosure also encompass all forms of sequences including, but not limited to, single-stranded forms, double-stranded forms, hairpins, stem-and-loop structures, and the like.

[0116] In some aspects, the present disclosure provides recombinant DNA constructs comprising a promoter that is functional in a tobacco cell and operably linked to a polynucleotide that encodes an RNA molecule capable of binding to an RNA encoding a polypeptide having an amino acid sequence at least 80%, at least 85%, at least 90%, at least 95%, at least 97%, at least 98%, at least 99% identical to an amino acid sequence selected from the group consisting of SEQ ID NOs: 49 to 68, 84, 116 to 130, 147, and fragments thereof, and wherein the RNA molecule suppresses the expression of the polypeptide. In some aspects, the RNA molecule is selected from the group consisting of a microRNA, an siRNA, and a trans-acting siRNA. In other aspects, the recombinant DNA construct encodes a double stranded RNA. Also provided are transgenic tobacco plants or part thereof, cured tobacco material, or tobacco products comprising these recombinant DNA constructs. In some aspects, these transgenic plants, cured tobacco material, or tobacco products comprise a lower level of nicotine compared to a control tobacco plant without the recombinant DNA construct. Further provided are methods of reducing the nicotine level of a tobacco plant, the method comprising transforming a tobacco plant with any of these recombinant DNA constructs.

[0117] As used herein, “operably linked” refers to a functional linkage between two or more elements. For example, an operable linkage between a polynucleotide of interest and a regulatory sequence (e.g., a promoter) is a functional link that allows for expression of the polynucleotide of interest. Operably linked elements may be contiguous or non-contiguous.

[0118] As used herein and when used in reference to a sequence, “heterologous” refers to a sequence that originates from a foreign species, or, if from the same species, is substantially modified from its native form in composition and/or genomic locus by deliberate human intervention. The term also is applicable to nucleic acid constructs, also referred to herein as “polynucleotide constructs” or “nucleotide constructs.” In this manner, a “heterologous” nucleic acid construct is intended to mean a construct that originates from a foreign species, or, if from the same species, is substantially modified from its native form in composition and/or genomic locus by deliberate human intervention. Heterologous nucleic acid constructs include, but are not limited to, recombinant nucleotide constructs that have been introduced into a plant or plant part thereof, for example, via transformation methods or subsequent breeding of a transgenic plant with another plant of interest. In an aspect, a promoter used herein is heterologous to the sequence driven by the promoter. In another aspect, a promoter used herein is heterologous to tobacco. In a further aspect, a promoter used herein is native to tobacco.

[0119] In an aspect, a modified tobacco plant described herein is a cisgenic plant. As used herein, “cisgenesis” or “cisgenic” refers to genetic modification of a plant, plant cell, or plant genome in which all components (e.g., promoter, donor nucleic acid, selection gene) have only plant origins (i.e., no non-plant origin components are used). In an aspect, a modified plant, plant cell, or plant genome provided herein is cisgenic. Cisgenic plants, plant cells, and plant genomes provided herein can lead to ready-to-use tobacco lines. In another aspect, a modified tobacco plant provided herein comprises no non-tobacco genetic material or sequences.

[0120] As used herein, “gene expression” refers to the biosynthesis or production of a gene product, including the transcription and/or translation of the gene product.

[0121] Also provided herein are compositions and methods for overexpressing one or more polypeptides from Nic1 locus in a plant, particularly plants of the Nicotiana genus, including tobacco plants of the various commercial varieties.

[0122] In some aspects, the present disclosure provides recombinant DNA constructs comprising a promoter that is functional in a tobacco cell and operably linked to a polynucleotide that encodes a polypeptide having an amino acid sequence at least 80%, at least 85%, at least 90%, at least 95%, at least 97%, at least 98%, at least 99%, or 100% identical to an amino acid sequence selected from the group consisting of SEQ ID NOs: 49 to 68, 84, 116 to 130, 147, and fragments thereof. Also provided are transgenic tobacco plants or part thereof, cured tobacco material, or tobacco products comprising these recombinant DNA constructs. In some aspects, these transgenic plants, cured tobacco material, or tobacco products comprise an increased level of nicotine compared to a control tobacco plant without the recombinant DNA construct. Further provided are methods of increasing the nicotine level of a tobacco plant, the method comprising transforming a tobacco plant with any of these recombinant DNA constructs.

[0123] In some aspects, recombinant DNA constructs or expression cassettes disclosed herein can also comprise a selectable marker gene for the selection of transgenic cells. Selectable marker genes include, but are not limited to, genes encoding antibiotic resistance, such as those encoding neomycin phosphotransferase II (NEO) and hygromycin phosphotransferase (HPT), as well as genes conferring resistance to herbicidal compounds, such as glufosinate ammonium, bromoxynil, imidazolinones, and 2,4-dichlorophenoxyacetate (2,4-D). Additional selectable markers include phenotypic markers such as β-galactosidase and fluorescent proteins such as green fluorescent protein (GFP).

[0124] In some aspects, recombinant DNA constructs or expression cassettes disclosed herein comprise a promoter selected from the group consisting of a constitutive promoter, an inducible promoter, and a tissue-preferred promoter (for example, a leaf-specific or root-specific promoter). Exemplary constitutive promoters include the core promoter of the Rsyn7 promoter and other constitutive promoters disclosed in U.S. Pat. No. 6,072,050; the core CaMV 35S promoter (Odell et al. (1985) Nature 313:810-812); ubiquitin (Christensen et al. (1989) Plant Mol. Biol. 12:619-632 and Christensen et al. (1992) Plant Mol. Biol. 18:675-689); pEMU (Last et al. (1991) Theor. Appl. Genet. 81:581-588); MAS (Velten et al. (1984) EMBO J 3:2723-2730); ALS promoter (U.S. Pat. No. 5,659,026), and the like. Exemplary chemical-inducible promoters include the tobacco PR-1a promoter, which is activated by salicylic acid. Other chemical-inducible promoters of interest include steroid-responsive promoters (see, for example, the glucocorticoid-inducible promoter in Schena et al. (1991) Proc. Natl. Acad. Sci. USA 88:10421-10425 and McNellis et al. (1998) Plant J. 14(2):247-257) and tetracycline-inducible promoters (see, for example, Gatz et al. (1991) Mol. Gen. Genet. 227:229-237, and U.S. Pat. Nos. 5,814,618 and 5,789,156). Additional exemplary promoters that can be used herein are those responsible for heat-regulated gene expression, light-regulated gene expression (for example, the pea rbcS-3A; the maize rbcS promoter; the chlorophyll alb-binding protein gene found in pea; or the Arabssu promoter), hormone-regulated gene expression (for example, the abscisic acid (ABA) responsive sequences from the Em gene of wheat; the ABA-inducible HVA1 and HVA22, and rd29A promoters of barley and Arabidopsis; and wound-induced gene expression (for example, of wunI), organ specific gene expression (for example, of the tuber-specific storage protein gene; the 23-kDa zein gene from maize described by; or the French bean (β-phaseolin gene), or pathogen-inducible promoters (for example, the PR-1, prp-1, or (B-1,3 glucanase promoters, the fungal-inducible wirla promoter of wheat, and the nematode-inducible promoters, TobRB7-5A and Hmg-1, of tobacco arid parsley, respectively).

[0125] In some aspects, tobacco plants provided herein further comprise increased or reduced expression of activity of genes involved in nicotine biosynthesis or transport. Genes involved in nicotine biosynthesis include, but are not limited to, arginine decarboxylase (ADC), methylputrescine oxidase (MPO), NADH dehydrogenase, ornithine decarboxylase

[0126] (ODC), phosphoribosylanthranilate isomerase (PRAI), putrescine N-methyltransferase (PMT), quinolate phosphoribosyl transferase (QPT), and S-adenosyl-methionine synthetase (SAMS). Nicotine Synthase, which catalyzes the condensation step between a nicotinic acid derivative and methylpyrrolinium cation, has not been elucidated although two candidate genes (A622 and NBB1) have been proposed. See US 2007/0240728 A1 and US 2008/0120737A1. A622 encodes an isoflavone reductase-like protein. In addition, several transporters may be involved in the translocation of nicotine. A transporter gene, named MATE, has been cloned and characterized (Morita et al., PNAS 106:2447-52 (2009)).

[0127] In some aspects, tobacco plants provided herein further comprise an increased or reduced level of mRNA, protein, or both of one or more genes encoding a product selected from the group consisting of PMT, MPO, QPT, ADC, ODC, PRAI, SAMS, BBL, MATE, A622, and NBB1, compared to a control tobacco plant. In other aspects, tobacco plants provided herein further comprise a transgene directly suppressing the expression of one or more genes encoding a product selected from the group consisting of PMT, MPO, QPT, ADC, ODC, PRAI, SAMS, BBL, MATE, A622, and NBB1. In other aspects, tobacco plants provided herein further comprise a transgene or mutation suppressing the expression or activity of one or more genes encoding a product selected from the group consisting of PMT, MPO, QPT, ADC, ODC, PRAI, SAMS, BBL, MATE, A622, and NBB1. In other aspects, tobacco plants provided herein further comprise a transgene overexpressing one or more genes encoding a product selected from the group consisting of PMT, MPO, QPT, ADC, ODC, PRAI, SAMS, BBL, MATE, A622, and NBB1.

[0128] Also disclosed herein are the transformation of tobacco plants with recombinant constructs or expression cassettes described herein using any suitable transformation methods known in the art. Methods for introducing polynucleotide sequences into tobacco plants are known in the art and include, but are not limited to, stable transformation methods, transient transformation methods, and virus-mediated methods. “Stable transformation” refers to transformation where the nucleotide construct of interest introduced into a plant integrates into the genome of the plant and is capable of being inherited by the progeny thereof. “Transient transformation” is intended to mean that a sequence is introduced into the plant and is only temporally expressed or is only transiently present in the plant.

[0129] Suitable methods of introducing polynucleotides into plant cells of the present disclosure include microinjection (Crossway et al. (1986) Biotechniques 4:320-334), electroporation (Shillito et al. (1987) Meth. Enzymol. 153:313-336; Riggs et al. (1986) Proc. Natl. Acad. Sci. USA 83:5602-5606), Agrobacterium-mediated transformation (U.S. Pat. Nos. 5,104,310, 5,149,645, 5,177,010, 5,231,019, 5,463,174, 5,464,763, 5,469,976, 4,762,785, 5,004,863, 5,159,135, 5,563,055, and 5,981,840), direct gene transfer (Paszkowski et al. (1984) EMBO J. 3:2717-2722), and ballistic particle acceleration (see, for example, U.S. Pat. Nos. 4,945,050, 5,141,131, 5,886,244, 5,879,918, and 5,932,782; Tomes et al. (1995) in Plant Cell, Tissue, and Organ Culture Fundamental Methods, ed. Gamborg and Phillips (Springer-Verlag, Berlin); McCabe et al. (1988) Biotechnology 6:923-926). Also see Weissinger et al. (1988) Ann. Rev. Genet. 22:421-477; Christou et al. (1988) Plant Physiol. 87:671-674 (soybean); McCabe et al. (1988) Bio/Technology 6:923-926 (soybean); Finer and McMullen (1991) In Vitro Cell Dev. Biol. 27P: 175-182 (soybean); Singh et al. (1998) Theor. Appl. Genet. 96:319-324 (soybean); De Wet et al. (1985) in The Experimental Manipulation of Ovule Tissues, ed. Chapman et al. (Longman, N.Y.), pp. 197-209 (pollen); Kaeppler et al. (1990) Plant Cell Reports 9:415-418 and Kaeppler et al. (1992) Theor. Appl. Genet. 84:560- 566 (whisker-mediated transformation); D′Halluin et al. (1992) Plant Cell 4:1495-1505 (electroporation).

[0130] In other aspects, recombinant constructs or expression cassettes disclosed herein may be introduced into plants by contacting plants with a virus or viral nucleic acids. Generally, such methods involve incorporating an expression cassette of the present disclosure within a viral DNA or RNA molecule. It is recognized that promoters for use in the expression cassettes disclosed herein also encompass promoters utilized for transcription by viral RNA polymerases. Methods for introducing polynucleotides into plants and expressing a protein encoded therein, involving viral DNA or RNA molecules, are known in the art. See, for example, U.S. Pat. Nos. 5,889,191, 5,889,190, 5,866,785, 5,589,367, 5,316,931, and Porta et al. (1996) Molecular Biotechnology 5:209-221.

[0131] Any plant tissue that can be subsequently propagated using clonal methods, whether by organogenesis or embryogenesis, may be transformed with a recombinant construct or an expression cassette disclosed herein. By “organogenesis” in intended the process by which shoots and roots are developed sequentially from meristematic centers. By “embryogenesis” is intended the process by which shoots and roots develop together in a concerted fashion (not sequentially), whether from somatic cells or gametes. Exemplary tissues that are suitable for various transformation protocols described herein include, but are not limited to, callus tissue, existing meristematic tissue (e.g., apical meristems, axillary buds, and root meristems) and induced meristem tissue (e.g., cotyledon meristem and hypocotyl meristem), hypocotyls, cotyledons, leaf disks, pollen, embryos, and the like.

[0132] In some aspects, tobacco plants provided herein are from a tobacco type selected from the group consisting of flue-cured tobacco, air-cured tobacco, dark air-cured tobacco, dark fire-cured tobacco, Galpao tobacco, and Oriental tobacco. In other aspects, tobacco plants provided herein are from a tobacco type selected from the group consisting of Burley tobacco, Maryland tobacco, and dark tobacco.

[0133] Flue-cured tobaccos (also called Virginia or bright tobaccos) amount to approximately 40% of world tobacco production. Flue-cured tobaccos are often also referred to as “bright tobacco” because of the golden-yellow to deep-orange color it reaches during curing. Flue-cured tobaccos have a light, bright aroma and taste. Flue-cured tobaccos are generally high in sugar and low in oils. Major flue-cured tobacco growing countries are Argentina, Brazil, China, India, Tanzania and the U.S. In some aspects, low-alkaloid or low-nicotine tobacco plants or seeds provided herein are in a flue-cured tobacco background selected from the group consisting of CC 13, CC 27, CC 33, CC 37, CC 65, CC 67, CC 700, GF 318, GL 338, GL 368, GL 939, K 346, K 399, K326, NC 102, NC 196, NC 291, NC 297, NC 299, NC 471, NC 55, NC 606, NC 71, NC 72, NC 92, PVH 1118, PVH 1452, PVH 2110, SPEIGHT 168, SPEIGHT 220, SPEIGHT 225, SPEIGHT 227, SPEIGHT 236, and any variety essentially derived from any one of the foregoing varieties. In other aspects, low-alkaloid or low-nicotine tobacco plants or seeds provided herein are in a flue-cured tobacco background selected from the group consisting of Coker 48, Coker 176, Coker 371-Gold, Coker 319, Coker 347, GL 939, K 149, K326, K 340, K 346, K 358, K 394, K 399, K 730, NC 27NF, NC 37NF, NC 55, NC 60, NC 71, NC 72, NC 82, NC 95, NC 297, NC 606, NC 729, NC 2326, McNair 373, McNair 944, Ox 207, Ox 414 NF, Reams 126, Reams 713, Reams 744, RG 8, RG 11, RG 13, RG 17, RG 22, RG 81, RG H4, RG H51, Speight H-20, Speight G-28, Speight G-58, Speight G-70, Speight G-108, Speight G-111, Speight G-117, Speight 168, Speight 179, Speight NF- 3, Va 116, Va 182, and any variety essentially derived from any one of the foregoing varieties. See WO 2004/041006 Al. In further aspects, low-alkaloid or low-nicotine tobacco plants, seeds, hybrids, varieties, or lines disclosed herein are in any flue cured background selected from the group consisting of K326, K346, and NC196.

[0134] Air-cured tobaccos include Burley, Maryland, and dark tobaccos. The common factor is that curing is primarily without artificial sources of heat and humidity. Burley tobaccos are light to dark brown in color, high in oil, and low in sugar. Burley tobaccos are air-cured in barns. Major Burley growing countries are Argentina, Brazil, Italy, Malawi, and the U.S. Maryland tobaccos are extremely fluffy, have good burning properties, low nicotine and a neutral aroma. Major Maryland growing countries include the U.S. and Italy. In some aspects, low-alkaloid or low-nicotine tobacco plants or seeds provided herein are in a Burley tobacco background selected from the group consisting of Clay 402, Clay 403, Clay 502, Ky 14, Ky 907, Ky 910, Ky 8959, NC 2, NC 3, NC 4, NC 5, NC 2000, TN 86, TN 90, TN 97, R 610, R 630, R 711, R 712, NCBH 129, Bu 21xKy 10, HBO4P, Ky 14xL 8, Kt 200, Newton 98, Pedigo 561, Pf561 and Va 509. In further aspects, low-alkaloid or low-nicotine tobacco plants, seeds, hybrids, varieties, or lines disclosed herein are in any Burley background selected from the group consisting of TN 90, KT 209, KT 206, KT212, and HB 4488. In other aspects, low-alkaloid or low-nicotine tobacco plants or seeds provided herein are in a Maryland tobacco background selected from the group consisting of Md 10, Md 40, Md 201, Md 609, Md 872 and Md 341.

[0135] Dark air-cured tobaccos are distinguished from other types primarily by its curing process which gives dark air-cured tobacco its medium- to dark-brown color and distinct aroma. Dark air-cured tobaccos are mainly used in the production of chewing tobacco and snuff. In some aspects, low-alkaloid or low-nicotine tobacco plants or seeds provided herein are in a dark air-cured tobacco background selected from the group consisting of Sumatra, Jatim, Dominican Cubano, Besuki, One sucker, Green River, Virginia sun-cured, and Paraguan Passado.

[0136] Dark fire-cured tobaccos are generally cured with low-burning wood fires on the floors of closed curing barns. Their leaves have low sugar content but high nicotine content. Dark fire-cured tobaccos are used for making pipe blends, cigarettes, chewing tobacco, snuff and strong-tasting cigars. Major growing regions for dark fire-cured tobaccos are Tennessee, Kentucky, and Virginia, USA. In some aspects, low-alkaloid or low-nicotine tobacco plants or seeds provided herein are in a dark fire-cured tobacco background selected from the group consisting of Narrow Leaf Madole, Improved Madole, Tom Rosson Madole, Newton's VH Madole, Little Crittenden, Green Wood, Little Wood, Small Stalk Black Mammoth, DT 508,

[0137] DT 518, DT 592, KY 171, DF 911, DF 485, TN D94, TN D950, VA 309, and VA 359.

[0138] Oriental tobaccos are also referred to as Greek, aroma and Turkish tobaccos due to the fact that they are typically grown in eastern Mediterranean regions such as Turkey, Greece, Bulgaria, Macedonia, Syria, Lebanon, Italy, and Romania. The small plant and leaf size, characteristic of today's Oriental varieties, as well as its unique aroma properties are a result of the plant's adaptation to the poor soil and stressful climatic conditions in which it develop over many past centuries. In some aspects, low-alkaloid or low-nicotine tobacco plants or seeds provided herein are in a Oriental tobacco background selected from the group consisting of Izmir, Katerini, Samsun, Basma and Krumovgrad, Trabzon, Thesalian, Tasova, Sinop, Izmit, Hendek, Edirne, Semdinli, Adiyanman, Yayladag, Iskenderun, Duzce,

[0139] Macedonian, Mavra, Prilep, Bafra, Bursa, Bucak, Bitlis, Balikesir, and any variety essentially derived from any one of the foregoing varieties.

[0140] In some aspects, low-alkaloid or low-nicotine tobacco plants, seeds, hybrids, varieties, or lines disclosed herein are essentially derived from or in the genetic background of BU 64, CC 101, CC 200, CC 27, CC 301, CC 400, CC 500, CC 600, CC 700, CC 800, CC 900, Coker 176, Coker 319, Coker 371 Gold, Coker 48, CU 263, DF911, Galpao tobacco, GL 26H, GL 350, GL 600, GL 737, GL 939, GL 973, HB 04P, K 149, K 326, K 346, K 358, K394, K 399, K 730, KDH 959, KT 200, KT204LC, KY 10, KY 14, KY 160, KY 17, KY 171, KY 907, KY907LC, KTY14 x L8 LC, Little Crittenden, McNair 373, McNair 944, msKY 14xL8, Narrow Leaf Madole, NC 100, NC 102, NC 2000, NC 291, NC 297, NC 299,

[0141] NC 3, NC 4, NC 5, NC 6, NC7, NC 606, NC 71, NC 72, NC 810, NC BH 129, NC 2002, Neal Smith Madole, OXFORD 207, ‘Perique’ tobacco, PVH03, PVH09, PVH19, PVH50, PVH51, R 610, R 630, R 7-11, R 7-12, RG 17, RG 81, RG H51, RGH 4, RGH 51, RS 1410, Speight 168, Speight 172, Speight 179, Speight 210, Speight 220, Speight 225, Speight 227, Speight 234, Speight G-28, Speight G-70, Speight H-6, Speight H20, Speight NF3, TI 1406,

[0142] TI 1269, TN 86, TN86LC, TN 90, TN 97, TN97LC, TN D94, TN D950, TR (Tom Rosson) Madole, VA 309, or VA359, Maryland 609, HB3307PLC, HB4488PLC, KT206LC, KT209LC, KT210LC, KT212LC, R610LC, PVH2310, NC196, KTD14LC, KTD6LC, KTD8LC, PD7302LC, PD7305LC, PD7309LC, PD7318LC, PD7319LC, PD7312LC, ShireyLC, or any commercial tobacco variety according to standard tobacco breeding techniques known in the art.

[0143] All foregoing mentioned specific varieties of dark air-cured, Burley, Maryland, dark fire-cured, or Oriental type are only listed for exemplary purposes. Any additional dark air-cured, Burley, Maryland, dark fire-cured, Oriental varieties are also contemplated in the present application.

[0144] Also provided herein are populations of tobacco plants described herein. In one aspect, a population of tobacco plants disclosed herein has a planting density of between about 5,000 and about 8000, between about 5,000 and about 7,600, between about 5,000 and about 7,200, between about 5,000 and about 6,800, between about 5,000 and about 6,400, between about 5,000 and about 6,000, between about 5,000 and about 5,600, between about 5,000 and about 5,200, between about 5,200 and about 8,000, between about 5,600 and about 8,000, between about 6,000 and about 8,000, between about 6,400 and about 8,000, between about 6,800 and about 8,000, between about 7,200 and about 8,000, or between about 7,600 and about 8,000 plants per acre. In another aspect, a population of tobacco plants disclosed herein is in a soil type with low to medium fertility.

[0145] Also provided herein are containers of seeds from tobacco plants described herein. A container of tobacco seeds of the present disclosure may contain any number, weight, or volume of seeds. For example, a container can contain at least, or greater than, about 100, 200, 300, 400, 500, 600, 700, 800, 900, 1000, 1500, 2000, 2500, 3000, 3500, 4000 or more seeds. Alternatively, the container can contain at least, or greater than, about 1 ounce, 5 ounces, 10 ounces, 1 pound, 2 pounds, 3 pounds, 4 pounds, 5 pounds or more seeds. Containers of tobacco seeds may be any container available in the art. By way of non-limiting example, a container may be a box, a bag, a packet, a pouch, a tape roll, a tube, or a bottle.

[0146] Also provided herein is cured tobacco material made from low-alkaloid or low-nicotine tobacco plants described herein. Further provided is cured tobacco material made from tobacco plants described herein with higher levels of total alkaloid or nicotine.

[0147] “Curing” is the aging process that reduces moisture and brings about the destruction of chlorophyll giving tobacco leaves a golden color and by which starch is converted to sugar. Cured tobacco therefore has a higher reducing sugar content and a lower starch content compared to harvested green leaf. In some aspects, green leaf tobacco provided herein can be cured using conventional means, e.g., flue-cured, barn-cured, fire-cured, air-cured or sun-cured. See, for example, Tso (1999, Chapter 1 in Tobacco, Production, Chemistry and Technology, Davis & Nielsen, eds., Blackwell Publishing, Oxford) for a description of different types of curing methods. Cured tobacco is usually aged in a wooden drum (e.g., a hogshead) or cardboard cartons in compressed conditions for several years (e.g., two to five years), at a moisture content ranging from 10% to about 25%. See, U.S. Patent Nos. 4,516,590 and 5,372,149. Cured and aged tobacco then can be further processed. Further processing includes conditioning the tobacco under vacuum with or without the introduction of steam at various temperatures, pasteurization, and fermentation. Fermentation typically is characterized by high initial moisture content, heat generation, and a 10 to 20% loss of dry weight. See, e.g., U.S. Patent Nos. 4,528,993, 4,660,577, 4,848,373, 5,372,149; U.S. Publication No. 2005/0178398; and Tso (1999, Chapter 1 in Tobacco, Production, Chemistry and Technology, Davis & Nielsen, eds., Blackwell Publishing, Oxford). Cure, aged, and fermented tobacco can be further processed (e.g., cut, shredded, expanded, or blended). See, for example, U.S. Patent Nos. 4,528,993; 4,660,577; and 4,987,907. In one aspect, the cured tobacco material of the present disclosure is sun-cured. In another aspect, the cured tobacco material of the present disclosure is flue-cured, air-cured, or fire-cured.

[0148] Tobacco material obtained from the tobacco lines, varieties or hybrids of the present disclosure can be used to make tobacco products. As used herein, “tobacco product” is defined as any product made or derived from tobacco that is intended for human use or consumption.

[0149] Tobacco products provided herein include, without limitation, cigarette products (e.g., cigarettes and bidi cigarettes), cigar products (e.g., cigar wrapping tobacco and cigarillos), pipe tobacco products, products derived from tobacco, tobacco-derived nicotine products, smokeless tobacco products (e.g., moist snuff, dry snuff, and chewing tobacco), films, chewables, tabs, shaped parts, gels, consumable units, insoluble matrices, hollow shapes, reconstituted tobacco, expanded tobacco, and the like. See, e.g., U.S. Patent Publication No. US 2006/0191548.

[0150] As used herein, “cigarette” refers a tobacco product having a “rod” and “filler”. The cigarette “rod” includes the cigarette paper, filter, plug wrap (used to contain filtration materials), tipping paper that holds the cigarette paper (including the filler) to the filter, and all glues that hold these components together. The “filler” includes (1) all tobaccos, including but not limited to reconstituted and expanded tobacco, (2) non-tobacco substitutes (including but not limited to herbs, non-tobacco plant materials and other spices that may accompany tobaccos rolled within the cigarette paper), (3) casings, (4) flavorings, and (5) all other additives (that are mixed into tobaccos and substitutes and rolled into the cigarette).

[0151] As used herein, “reconstituted tobacco” refers to a part of tobacco filler made from tobacco dust and other tobacco scrap material, processed into sheet form and cut into strips to resemble tobacco. In addition to the cost savings, reconstituted tobacco is very important for its contribution to cigarette taste from processing flavor development using reactions between ammonia and sugars.

[0152] As used herein, “expanded tobacco” refers to a part of tobacco filler which is processed through expansion of suitable gases so that the tobacco is “puffed” resulting in reduced density and greater filling capacity. It reduces the weight of tobacco used in cigarettes.

[0153] Tobacco products derived from plants of the present disclosure also include cigarettes and other smoking articles, particularly those smoking articles including filter elements, wherein the rod of smokable material includes cured tobacco within a tobacco blend. In an aspect, a tobacco product of the present disclosure is selected from the group consisting of a cigarillo, a non-ventilated recess filter cigarette, a vented recess filter cigarette, a cigar, snuff, pipe tobacco, cigar tobacco, cigarette tobacco, chewing tobacco, leaf tobacco, hookah tobacco, shredded tobacco, and cut tobacco. In another aspect, a tobacco product of the present disclosure is a smokeless tobacco product. Smokeless tobacco products are not combusted and include, but not limited to, chewing tobacco, moist smokeless tobacco, snus, and dry snuff. Chewing tobacco is coarsely divided tobacco leaf that is typically packaged in a large pouch-like package and used in a plug or twist. Moist smokeless tobacco is a moist, more finely divided tobacco that is provided in loose form or in pouch form and is typically packaged in round cans and used as a pinch or in a pouch placed between an adult tobacco consumer's cheek and gum. Snus is a heat treated smokeless tobacco. Dry snuff is finely ground tobacco that is placed in the mouth or used nasally. In a further aspect, a tobacco product of the present disclosure is selected from the group consisting of loose leaf chewing tobacco, plug chewing tobacco, moist snuff, and nasal snuff. In yet another aspect, a tobacco product of the present disclosure is selected from the group consisting of an electronically heated cigarette, an e-cigarette, an electronic vaporing device.

[0154] In an aspect, a tobacco product of the present disclosure can be a blended tobacco product. In another aspect, a tobacco product of the present disclosure can be a low nicotine tobacco product. In a further aspect, a tobacco product of the present disclosure may comprise nornicotine at a level of less than about 3 mg/g. For example, the nornicotine content in such a product can be 3.0 mg/g, 2.5 mg/g, 2.0 mg/g, 1.5 mg/g, 1.0 mg/g, 750 μg/g, 500 pg/g, 250 pg/g, 100 pg/g, 75 pg/g, 50 pg/g, 25 pg/g, 10 pg/g, 7.0 pg/g, 5.0 pg/g, 4.0 pg/g, 2.0 pg/g, 1.0 pg/g, 0.5 pg/g, 0.4 pg/g, 0.2 pg/g, 0.1 pg/g, 0.05 pg/g, 0.01 pg/g, or undetectable.

[0155] In some aspects, cured tobacco material or tobacco products provided herein comprise an average nicotine level selected from the group consisting of about 0.01%, 0.02%, 0.05%, 0.75%, 0.1%, 0.15%, 0.2%, 0.3%, 0.35%, 0.4%, 0.5%, 0.6%, 0.7%, 0.8%, 0.9%, 1%, 1.1%, 1.2%, 1.3%, 1.4%, 1.5%, 1.6%, 1.7%, 1.8%, 1.9%, 2%, 2.1%, 2.2%, 2.3%, 2.4%, 2.5%, 2.6%, 2.7%, 2.8%, 2.9%, 3%, 3.1%, 3.2%, 3.3%, 3.4%, 3.5%, 3.6%, 3.7%, 3.8%, 3.9%, 4%, 5%, 6%, 7%, 8%, and 9% on a dry weight basis. In other aspects, cured tobacco material or tobacco products provided herein comprise an average nicotine level selected from the group consisting of about between 0.01% and 0.02%, between 0.02% and 0.05%, between 0.05% and 0.75%, between 0.75% and 0.1%, between 0.1% and 0.15%, between 0.15% and 0.2%, between 0.2% and 0.3%, between 0.3% and 0.35%, between 0.35% and 0.4%, between 0.4% and 0.5%, between 0.5% and 0.6%, between 0.6% and 0.7%, between 0.7% and 0.8%, between 0.8% and 0.9%, between 0.9% and 1%, between 1% and 1.1%, between 1.1% and 1.2%, between 1.2% and 1.3%, between 1.3% and 1.4%, between 1.4% and 1.5%, between 1.5% and 1.6%, between 1.6% and 1.7%, between 1.7% and 1.8%, between 1.8% and 1.9%, between 1.9% and 2%, between 2% and 2.1%, between 2.1% and 2.2%, between 2.2% and 2.3%, between 2.3% and 2.4%, between 2.4% and 2.5%, between 2.5% and 2.6%, between 2.6% and 2.7%, between 2.7% and 2.8%, between 2.8% and 2.9%, between 2.9% and 3%, between 3% and 3.1%, between 3.1% and 3.2%, between 3.2% and 3.3%, between 3.3% and 3.4%, between 3.4% and 3.5%, and between 3.5% and 3.6% on a dry weight basis. In further aspects, cured tobacco material or tobacco products provided herein comprise an average nicotine level selected from the group consisting of about between 0.01% and 0.1%, between 0.02% and 0.2%, between 0.03% and 0.3%, between 0.04% and 0.4%, between 0.05% and 0.5%, between 0.75% and 1%, between 0.1% and 1.5%, between 0.15% and 2%, between 0.2% and 3%, and between 0.3% and 3.5% on a dry weight basis.

[0156] The present disclosure also provides methods for breeding tobacco lines, cultivars, or varieties comprising a desirable level of total alkaloid or nicotine, e.g., low nicotine or nicotine free. Breeding can be carried out via any known procedures. DNA fingerprinting, SNP mapping, haplotype mapping or similar technologies may be used in a marker-assisted selection (MAS) breeding program to transfer or breed a desirable trait or allele into a tobacco plant. For example, a breeder can create segregating populations in a F₂ or backcross generation using F1 hybrid plants disclosed herein or further crossing the F1 hybrid plants with other donor plants with an agronomically desirable genotype. Plants in the F₂ or backcross generations can be screened for a desired agronomic trait or a desirable chemical profile using one of the techniques known in the art or listed herein. Depending on the expected inheritance pattern or the MAS technology used, self-pollination of selected plants before each cycle of backcrossing to aid identification of the desired individual plants can be performed. Backcrossing or other breeding procedure can be repeated until the desired phenotype of the recurrent parent is recovered. A recurrent parent in the present disclosure can be a flue-cured variety, a Burley variety, a dark air-cured variety, a dark fire-cured variety, or an Oriental variety. Other breeding techniques can be found, for example, in Wernsman, E. A., and Rufty, R. C. 1987. Chapter Seventeen. Tobacco. Pages 669-698 In: Cultivar Development. Crop Species. W. H. Fehr (ed.), MacMillan Publishing Go., Inc., New York, N.Y., incorporated herein by reference in their entirety.

[0157] Results of a plant breeding program using the tobacco plants described herein includes useful lines, cultivars, varieties, progeny, inbreds, and hybrids of the present disclosure. As used herein, the term “variety” refers to a population of plants that share constant characteristics which separate them from other plants of the same species. A variety is often, although not always, sold commercially. While possessing one or more distinctive traits, a variety is further characterized by a very small overall variation between individuals within that variety. A “pure line” variety may be created by several generations of self-pollination and selection, or vegetative propagation from a single parent using tissue or cell culture techniques. A variety can be essentially derived from another line or variety. As defined by the International Convention for the Protection of New Varieties of Plants (Dec. 2, 1961, as revised at Geneva on Nov. 10, 1972; on Oct. 23, 1978; and on Mar. 19, 1991), a variety is “essentially derived” from an initial variety if: a) it is predominantly derived from the initial variety, or from a variety that is predominantly derived from the initial variety, while retaining the expression of the essential characteristics that result from the genotype or combination of genotypes of the initial variety; b) it is clearly distinguishable from the initial variety; and c) except for the differences which result from the act of derivation, it conforms to the initial variety in the expression of the essential characteristics that result from the genotype or combination of genotypes of the initial variety. Essentially derived varieties can be obtained, for example, by the selection of a natural or induced mutant, a somaclonal variant, a variant individual from plants of the initial variety, backcrossing, or transformation. A first tobacco variety and a second tobacco variety from which the first variety is essentially derived, are considered as having essentially identical genetic background. A “line” as distinguished from a variety most often denotes a group of plants used non-commercially, for example in plant research. A line typically displays little overall variation between individuals for one or more traits of interest, although there may be some variation between individuals for other traits.

[0158] In some aspects, the present disclosure provides a method of introgressing a low nicotine trait into a tobacco variety, the method comprising: (a) crossing a first tobacco variety comprising a low nicotine trait with a second tobacco variety without the low nicotine trait to produce one or more progeny tobacco plants; (b) genotyping the one or more progeny tobacco plants for a polymorphic marker linked to the low nicotine trait, wherein the polymorphic marker is in a chromosomal interval flanked by any two of polymorphic loci listed in Table 3 or flanked by any two of polymorphic loci listed in Table 4; and (c) selecting a progeny tobacco plant comprising the low nicotine trait. In other aspects, these methods further comprise backcrossing the selected progeny tobacco plant with the second tobacco variety. In further aspects, these methods further comprise: (d) crossing the selected progeny plant with itself or with the second tobacco variety to produce one or more further progeny tobacco plants; and (e) selecting a further progeny tobacco plant comprising the low nicotine trait. In some aspects, the step (e) of selecting comprises marker-assisted selection. In some aspects, these methods produce a single gene conversion comprising a low nicotine trait. In some aspects, these methods produce a single gene conversion comprising a Nic1 introgression. In some aspects, the second second tobacco variety is an elite variety. In other aspects, the genotyping step of these methods involve one or more molecular marker assays. In other aspects, the polymorphic marker used this method comprises a polymorphism selected from the group consisting of single nucleotide polymorphisms (SNPs), insertions or deletions in DNA sequence (Indels), simple sequence repeats of DNA sequence (SSRs), a restriction fragment length polymorphism (RFLP), and a tag SNP. In other aspects, the selected progeny tobacco plant comprises a shorter chromosome deletion at Nic1 locus compared to LA Burley 21.

[0159] In other aspects, the present disclosure provides a method of introgressing a low nicotine trait into a tobacco variety, the method comprising: (a) crossing a first tobacco variety comprising a low nicotine trait with a second tobacco variety without the low nicotine trait to produce one or more progeny tobacco plants; (b) genotyping the one or more progeny tobacco plants for a polymorphic marker linked to the low nicotine trait, wherein the polymorphic marker is within 20 cM of any one of polymorphic loci listed in Table 3 and Table 4; and (c) selecting a progeny tobacco plant comprising the low nicotine trait. In some aspects, this method comprises selecting simultaneously or concurrently for one or more molecular markers associated with or closely linked to Nic1 locus as well as one or more molecular markers associated with or closely linked to Nic2 locus.

[0160] In some aspects, the present disclosure provides a method of selecting a tobacco plant having a low nicotine trait, the method comprising: (a) isolating nucleic acids from a collection of tobacco germplasm; (b) assaying the nucleic acids for one or more markers closely linked to Nic1 locus; and (c) selecting a tobacco plant having a low nicotine trait based on the marker assay. In some aspects, the assayed one or more markers closely linked to Nic1 locus are within about 20 cM, 10 cM, 5 cM, 4 cM, 3 cM, 2 cM, 1 cM, 0.5 cM, or less than 0.5 cM of any one of polymorphic loci listed in Table 3. In other aspects, this method further comprising assaying for one or more markers closely linked to Nic2 locus. In some aspects, the assayed one or more markers closely linked to Nic2 locus are within about 20 cM, 10 cM, 5 cM, 4 cM, 3 cM, 2 cM, 1 cM, 0.5 cM, or less than 0.5 cM of any one of polymorphic loci listed in Table 4. In some aspects, this method further comprises determining the nicotine level of the selected plant to confirm the low nicotine trait.

[0161] Also disclosed herein is a method of introgressing a low nicotine trait into a tobacco variety, the method comprising: (a) crossing a first tobacco variety comprising a low nicotine trait with a second tobacco variety without the low nicotine trait to produce one or more progeny tobacco plants; (b) genotyping the one or more progeny tobacco plants for a polymorphic marker linked to the low nicotine trait, wherein the polymorphic marker is in a chromosomal interval flanked by any two of polymorphic loci listed in Table 4; and (c) selecting a progeny tobacco plant comprising the low nicotine trait. In some aspects, these methods produce a single gene conversion comprising a low nicotine trait. In some aspects, these methods produce a single gene conversion comprising a Nic2 introgression. In some aspects, the second tobacco variety is an elite variety. In other aspects, the genotyping step of these methods involve one or more molecular marker assays. In other aspects, the polymorphic marker used this method comprises a polymorphism selected from the group consisting of single nucleotide polymorphisms (SNPs), insertions or deletions in DNA sequence (Indels), simple sequence repeats of DNA sequence (SSRs), a restriction fragment length polymorphism (RFLP), and a tag SNP. In other aspects, the selected progeny tobacco plant comprises a shorter chromosome deletion at Nic2 locus compared to LA Burley 21.

[0162] As used herein, “locus” is a chromosome region where a polymorphic nucleic acid, trait determinant, gene, or marker is located. The loci of this disclosure comprise one or more polymorphisms in a population; e.g., alternative alleles are present in some individuals. As used herein, “allele” refers to an alternative nucleic acid sequence at a particular locus. The length of an allele can be as small as 1 nucleotide base, but is typically larger. For example, a first allele can occur on one chromosome, while a second allele occurs on a second homologous chromosome, e.g., as occurs for different chromosomes of a heterozygous individual, or between different homozygous or heterozygous individuals in a population. As used herein, the term “chromosome interval” designates a contiguous linear span of genomic DNA that resides on a single chromosome.

[0163] As used herein, a centimorgan (“cM”) is a unit of measure of recombination frequency. One cM is equal to a 1% chance that a marker at one genetic locus will be separated from a marker at, a second locus due to crossing over in a single generation. Genetic distances referred herein can be calculated from recombination values using the Kosambi function (Kosambi, The estimation of map distances from recombination values. Annals of Eugenics, 12:172-75 (1944)).

[0164] As used herein, “closely linked to” or “associated with” means that the marker or locus is within about 20 cM, 10 cM, 5 cM, 1 cM, 0.5 cM, or less than 0.5 cM of another marker or locus. For example, 20 cM means that recombination between the marker and the locus with a frequency of equal to or less than about 20%.

[0165] As used herein, “introgression” or “introgress” refers to the transmission of a desired allele of a genetic locus from one genetic background to another.

[0166] As used herein, “crossed” or “cross” means to produce progeny via fertilization (e.g. cells, seeds or plants) and includes crosses between plants (sexual) and self fertilization (selfing).

[0167] As used herein, “backcross” and “backcrossing” refer to the process whereby a progeny plant is repeatedly crossed back to one of its parents. In a backcrossing scheme, the “donor” parent refers to the parental plant with the desired gene or locus to be introgressed. The “recipient” parent (used one or more times) or “recurrent” parent (used two or more times) refers to the parental plant into which the gene or locus is being introgressed. The initial cross gives rise to the F1 generation. The term “BC1” refers to the second use of the recurrent parent, “BC2” refers to the third use of the recurrent parent, and so on. In some aspects, a backcross is performed repeatedly, with a progeny individual of each successive backcross generation being itself backcrossed to the same parental genotype.

[0168] As used herein, “single gene converted” or “single gene conversion” refers to plants that are developed using a plant breeding technique known as backcrossing, or via genetic engineering, wherein essentially all of the desired morphological and physiological characteristics of a variety are recovered in addition to the single gene transferred into the variety via the backcrossing technique or via genetic engineering.

[0169] As used herein, “elite variety” means any variety that has resulted from breeding and selection for superior agronomic performance.

[0170] As used herein, “selecting” or “selection” in the context of marker-assisted selection or breeding refer to the act of picking or choosing desired individuals, normally from a population, based on certain pre-determined criteria.

[0171] As used herein, the term “trait” refers to one or more detectable characteristics of a cell or organism which can be influenced by genotype. The phenotype can be observable to the naked eye, or by any other means of evaluation known in the art, e.g., microscopy, biochemical analysis, genomic analysis, an assay for a particular disease tolerance, etc. In some cases, a phenotype is directly controlled by a single gene or genetic locus, e.g., a “single gene trait.” In other cases, a phenotype is the result of several genes.

[0172] As used herein, “marker assay” means a method for detecting a polymorphism at a particular locus using a particular method, e.g., measurement of at least one phenotype (such as seed color, flower color, or other visually detectable trait), restriction fragment length polymorphism (RFLP), single base extension, electrophoresis, sequence alignment, allelic specific oligonucleotide hybridization (ASO), random amplified polymorphic DNA (RAPD), microarray-based technologies, and nucleic acid sequencing technologies, etc.

[0173] As used herein, “marker assisted selection” (MAS) is a process by which phenotypes are selected based on marker genotypes. “Marker assisted selection breeding” refers to the process of selecting a desired trait or traits in a plant or plants by detecting one or more nucleic acids from the plant, where the nucleic acid is linked to the desired trait, and then selecting the plant or germplasm possessing those one or more nucleic acids.

[0174] As used herein, “polymorphism” means the presence of one or more variations in a population. A polymorphism may manifest as a variation in the nucleotide sequence of a nucleic acid or as a variation in the amino acid sequence of a protein. Polymorphisms include the presence of one or more variations of a nucleic acid sequence or nucleic acid feature at one or more loci in a population of one or more individuals. The variation may comprise but is not limited to one or more nucleotide base changes, the insertion of one or more nucleotides or the deletion of one or more nucleotides. A polymorphism may arise from random processes in nucleic acid replication, through mutagenesis, as a result of mobile genomic elements, from copy number variation and during the process of meiosis, such as unequal crossing over, genome duplication and chromosome breaks and fusions. The variation can be commonly found or may exist at low frequency within a population, the former having greater utility in general plant breeding and the latter may be associated with rare but important phenotypic variation. Useful polymorphisms may include single nucleotide polymorphisms (SNPs), insertions or deletions in DNA sequence (Indels), simple sequence repeats of DNA sequence (SSRs), a restriction fragment length polymorphism (RFLP), and a tag SNP. A genetic marker, a gene, a DNA-derived sequence, a RNA-derived sequence, a promoter, a 5′ untranslated region of a gene, a 3′ untranslated region of a gene, microRNA, siRNA, a tolerance locus, a satellite marker, a transgene, mRNA, ds mRNA, a transcriptional profile, and a methylation pattern may also comprise polymorphisms. In addition, the presence, absence, or variation in copy number of the preceding may comprise polymorphisms.

[0175] As used herein, “SNP” or “single nucleotide polymorphism” means a sequence variation that occurs when a single nucleotide (A, T, C, or G) in the genome sequence is altered or variable. “SNP markers” exist when SNPs are mapped to sites on the genome.

[0176] As used herein, “marker” or “molecular marker” or “marker locus” is a term used to denote a nucleic acid or amino acid sequence that is sufficiently unique to characterize a specific locus on the genome. Any detectable polymorphic trait can be used as a marker so long as it is inherited differentially and exhibits linkage disequilibrium with a phenotypic trait of interest. Each marker is therefore an indicator of a specific segment of DNA, having a unique nucleotide sequence. The map positions provide a measure of the relative positions of particular markers with respect to one another. When a trait is stated to be linked to a given marker it will be understood that the actual DNA segment whose sequence affects the trait generally co-segregates with the marker. More precise and definite localization of a trait can be obtained if markers are identified on both sides of the trait. By measuring the appearance of the marker(s) in progeny of crosses, the existence of the trait can be detected by relatively simple molecular tests without actually evaluating the appearance of the trait itself, which can be difficult and time-consuming because the actual evaluation of the trait requires growing plants to a stage and/or under environmental conditions where the trait can be expressed. In some aspects, markers used herein exhibit LOD scores of 2 or greater, 3 or greater, 4 or greater, 5 or greater, 6 or greater, 7 or greater, 8 or greater, or 9 or greater with Nic1 or Nic2 loci disclosed herein, measuring using a method known in the art such as Qgene Version 2.23 (1996) and default parameters.

[0177] In one aspect, the present disclosure provides a tobacco plant, or part thereof, comprising a first chromosomal deletion flanked by and not comprising any two of Nic1 Marker Nos. 1 to 207, a second chromosomal deletion flanked by and not comprising any two of Nic2 Marker Nos. 1 to 340, or both said first and said second chromosomal deletions, wherein said tobacco plant is capable of producing leaves having a USDA grade index value of 50 or more, 55 or more, 60 or more, 65 or more, 70 or more, 75 or more, 80 or more, 85 or more, 90 or more, or 95 or more. In another aspect, a tobacco plant comprises a nicotine level selected from the group consisting of less than 3%, less than 2.75%, less than 2.5%, less than 2.25%, less than 2.0%, less than 1.75%, less than 1.5%, less than 1.25%, less than 1%, less than 0.9%, less than 0.8%, less than 0.7%, less than 0.6%, less than 0.5%, less than 0.4%, less than 0.3%, less than 0.2%, less than 0.1%, and less than 0.05%. In one aspect, further provided are a population of the tobacco plants in this paragraph, cured tobacco material made therefrom, a tobacco blend comprising said cured tobacco material, and a tobacco product comprising the cured tobacco material.

[0178] In another aspect, the present disclosure provides a tobacco plant, or part thereof, comprising a mutation selected from the group consisting of a first chromosomal deletion flanked by and not comprising any two of Nic1 Marker Nos. 1 to 207, a second chromosomal deletion flanked by and not comprising any two of Nic2 Marker Nos. 1 to 340, and both said first and said second chromosomal deletions, wherein said tobacco plant is capable of producing leaves having a USDA grade index value comparable to that of a control plant when grown in similar growth conditions, wherein said control plant shares an essentially identical genetic background with said tobacco plant except said mutation. In one aspect, a tobacco plant comprises nicotine at a level below 1%, below 2%, below 5%, below 8%, below 10%, below 12%, below 15%, below 20%, below 25%, below 30%, below 40%, below 50%, below 60%, below 70%, or below 80% of the nicotine level of said control plant when grown in similar growth conditions. In one aspect, further provided are a population of the tobacco plants in this paragraph, cured tobacco material made therefrom, a tobacco blend comprising said cured tobacco material, and a tobacco product comprising the cured tobacco material.

[0179] In one aspect, a first chromosomal deletion is flanked by and not comprising any two of Nic1 Marker Nos. 1 to 20, 21 to 40, 41 to 60, 61 to 80, 81 to 100, 101 to 120, 121 to 140, 141 to 160, 161 to 180, 181 to 200, or 201 to 207. In another aspect, a first chromosomal deletion is flanked by and not comprising any two of Nic1 Marker Nos. 1 to 10, 11 to 20, 21 to 30, 31 to 40, 41 to 50, 51 to 60, 61 to 70, 71 to 80, 81 to 90, 91 to 100, 101 to 110, 111 to 120, 121 to 130, 131 to 140, 141 to 150, 151 to 160, 161 to 170, 171 to 180, 181 to 190, 191 to 200, or 201 to 207.

[0180] In one aspect, a second chromosomal deletion is flanked by and not comprising any two of Nic2 Marker Nos. 1 to 20, 21 to 40, 41 to 60, 61 to 80, 81 to 100, 101 to 120, 121 to 140, 141 to 160, 161 to 180, 181 to 200, 201 to 220, 221 to 240, 241 to 260, 261 to 280, 281 to 300, 301 to 320, or 321 to 340. In another aspect, a second chromosomal deletion is flanked by and not comprising any two of Nic2 Marker Nos. 1 to 10, 11 to 20, 21 to 30, 31 to 40,41 to 50,51 to 60,61 to 70,71 to 80,81 to 90, 91 to 100, 101 to 110, 111 to 120, 121 to 130, 131 to 140, 141 to 150, 151 to 160, 161 to 170, 171 to 180, 181 to 190, 191 to 200, 201 to 210, 211 to 220, 221 to 230, 231 to 240, 241 to 250, 251 to 260, 261 to 270, 271 to 280, 281 to 290, 291 to 300, 301 to 310, 311 to 320, 321 to 330, or 331 to 340.

[0181] It is understood that any tobacco plant of the present disclosure can further comprise additional agronomically desirable traits, for example, by transformation with a genetic construct or transgene using a technique known in the art. Without limitation, an example of a desired trait is herbicide resistance, pest resistance, disease resistance; high yield; high grade index value; curability; curing quality; mechanical harvestability; holding ability; leaf quality; height, plant maturation (e.g., early maturing, early to medium maturing, medium maturing, medium to late maturing, or late maturing); stalk size (e.g., a small, medium, or a large stalk); or leaf number per plant (e.g., a small (e.g., 5-10 leaves), medium (e.g., 11-15 leaves), or large (e.g., 16-21) number of leaves), or any combination. In some aspects, low-nicotine or nicotine-free tobacco plants or seeds disclosed herein comprise one or more transgenes expressing one or more insecticidal proteins, such as, for example, a crystal protein of Bacillus thuringiensis or a vegetative insecticidal protein from Bacillus cereus, such as VIP3 (see, for example, Estruch et al. (1997) Nat. Biotechnol.15:137). In other aspects, tobacco plants disclosed herein further comprise an introgressed trait conferring resistance to brown stem rot (U.S. Pat. No. 5,689,035) or resistance to cyst nematodes (U.S. Pat. No. 5,491,081).

[0182] The present disclosure also provides tobacco plants comprising an altered nicotine level but having a yield comparable to the yield of corresponding initial tobacco plants without such a nicotine level alternation. In one aspect, a low-nicotine or nicotine-free tobacco variety disclosed herein provides a yield selected from the group consisting of about between 1200 and 3500, between 1300 and 3400, between 1400 and 3300, between 1500 and 3200, between 1600 and 3100, between 1700 and 3000, between 1800 and 2900, between 1900 and 2800, between 2000 and 2700, between 2100 and 2600, between 2200 and 2500, and between 2300 and 2400 lbs/acre. In another aspect, a low-nicotine or nicotine-free tobacco variety disclosed herein provides a yield selected from the group consisting of about between 1200 and 3500, between 1300 and 3500, between 1400 and 3500, between 1500 and 3500, between 1600 and 3500, between 1700 and 3500, between 1800 and 3500, between 1900 and 3500, between 2000 and 3500, between 2100 and 3500, between 2200 and 3500, between 2300 and 3500, between 2400 and 3500, between 2500 and 3500, between 2600 and 3500, between 2700 and 3500, between 2800 and 3500, between 2900 and 3500, between 3000 and 3500, and between 3100 and 3500 lbs/acre. In further aspects, low-nicotine or nicotine-free tobacco plants disclosed herein provide a yield between 65% and 130%, between 70% and 130%, between 75% and 130%, between 80% and 130%, between 85% and 130%, between 90% and 130%, between 95% and 130%, between 100% and 130%, between 105% and 130%, between 110% and 130%, between 115% and 130%, or between 120% and 130% of the yield of a control plant having essentially identical genetic background except a Nic1 mutation, a Nic2 mutation, a Nic1 transgene, a Nic2 transgene, or combinations thereof. In further aspects, low-nicotine or nicotine-free tobacco plants disclosed herein provide a yield between 70% and 125%, between 75% and 120%, between 80% and 115%, between 85% and 110%, or between 90% and 100% of the yield of a control plant having essentially identical genetic background except a Nic1 mutation, a Nic2 mutation, a Nic1 transgene, a Nic2 transgene, or combinations thereof.

[0183] In one aspect, a low-nicotine or nicotine-free tobacco variety disclosed herein is adapted for machine harvesting. In another aspect, a low-nicotine or nicotine-free tobacco variety disclosed herein is harvested mechanically.

[0184] In some aspects, tobacco plants provided herein are hybrid plants. Hybrids can be produced by preventing self-pollination of female parent plants (e.g., seed parents) of a first variety, permitting pollen from male parent plants of a second variety to fertilize the female parent plants, and allowing F1 hybrid seeds to form on the female plants. Self-pollination of female plants can be prevented by emasculating the flowers at an early stage of flower development. Alternatively, pollen formation can be prevented on the female parent plants using a form of male sterility. For example, male sterility can be produced by male sterility (MS), or transgenic male sterility wherein a transgene inhibits microsporogenesis and/or pollen formation, or self-incompatibility. Female parent plants containing MS are particularly useful. In aspects in which the female parent plants are MS, pollen may be harvested from male fertile plants and applied manually to the stigmas of MS female parent plants, and the resulting F₁ seed is harvested.

[0185] Plants can be used to form single-cross tobacco F₁ hybrids. Pollen from a male parent plant is manually transferred to an emasculated female parent plant or a female parent plant that is male sterile to form F₁ seed. Alternatively, three-way crosses can be carried out wherein a single-cross F₁ hybrid is used as a female parent and is crossed with a different male parent. As another alternative, double-cross hybrids can be created wherein the F1 progeny of two different single-crosses are themselves crossed. Self-incompatibility can be used to particular advantage to prevent self-pollination of female parents when forming a double-cross hybrid.

[0186] In one aspect, a low-nicotine or nicotine-free tobacco variety disclosed herein is male sterile. In another aspect, a low-nicotine or nicotine-free tobacco variety disclosed herein is cytoplasmic male sterile. Male sterile tobacco plants may be produced by any method known in the art. Methods of producing male sterile tobacco are described in Wernsman, E. A., and Rufty, R. C. 1987. Chapter Seventeen. Tobacco. Pages 669-698 In:

[0187] Cultivar Development. Crop Species. W. H. Fehr (ed.), MacMillan Publishing Go., Inc., New York, N.Y. 761 pp.

[0188] In further aspects, tobacco parts provided herein include, but are not limited to, a leaf, a stem, a root, a seed, a flower, pollen, an anther, an ovule, a pedicel, a fruit, a meristem, a cotyledon, a hypocotyl, a pod, an embryo, endosperm, an explant, a callus, a tissue culture, a shoot, a cell, and a protoplast. In one aspect, tobacco part provided herein does not include seed. In one aspect, this disclosure provides tobacco plant cells, tissues, and organs that are not reproductive material and do not mediate the natural reproduction of the plant. In another aspect, this disclosure also provides tobacco plant cells, tissues, and organs that are reproductive material and mediate the natural reproduction of the plant. In another aspect, this disclosure provides tobacco plant cells, tissues, and organs that cannot maintain themselves via photosynthesis. In another aspect, this disclosure provides somatic tobacco plant cells. Somatic cells, contrary to germline cells, do not mediate plant reproduction.

[0189] The provided cells, tissues and organs may be from seed, fruit, leaf, cotyledon, hypocotyl, meristem, embryos, endosperm, root, shoot, stem, pod, flower, infloresence, stalk, pedicel, style, stigma, receptacle, petal, sepal, pollen, anther, filament, ovary, ovule, pericarp, phloem, vascular tissue. In another aspect, this disclosure provides a tobacco plant chloroplast. In a further aspect, this disclosure provides epidermal cells, stomata cell, leaf or root hairs, a storage root, or a tuber. In another aspect, this disclosure provides a tobacco protoplast.

[0190] Skilled artisans understand that tobacco plants naturally reproduce via seeds, not via asexual reproduction or vegetative propagation. In one aspect, this disclosure provides tobacco endosperm. In another aspect, this disclosure provides tobacco endosperm cells. In a further aspect, this disclosure provides a male or female sterile tobacco plant, which cannot reproduce without human intervention.

[0191] In some aspects, the present disclosure provides a nucleic acid molecule comprising at least about 40%, 45%, 50%, 55%, 60%, 65%, 70%, 75%, 80%, 85%, 90%, 91%, 92%, 93%, 94%, 95%, 96%, 97%, 98%, 99%, or 100% identity to a sequence selected from the group consisting of SEQ ID NOs: 9 to 48, 75 to 82, 86 to 115, and 131 to 146, and fragments thereof. In other aspects, the present disclosure provides a nucleic acid molecule comprising at least about 40%, 45%, 50%, 55%, 60%, 65%, 70%, 75%, 80%, 85%, 90%, 91%, 92%, 93%, 94%, 95%, 96%, 97%, 98%, 99%, or 100% identity to a sequence selected from the group consisting of SEQ ID NOs: 13, 28, 33, 48, 82, 86, 87, 101, 102, 145, 146, and fragments thereof. In some aspects, the present disclosure provides a polypeptide or protein comprising at least about 40%, 45%, 50%, 55%, 60%, 65%, 70%, 75%, 80%, 85%, 90%, 91%, 92%, 93%, 94%, 95%, 96%, 97%, 98%, 99%, or 100% identity to an amino acid sequence selected from the group consisting of SEQ ID NOs: 49 to 68, 116 to 130, and 147. In other aspects, the present disclosure provides a polypeptide or protein comprising at least about 40%, 45%, 50%, 55%, 60%, 65%, 70%, 75%, 80%, 85%, 90%, 91%, 92%, 93%, 94%, 95%, 96%, 97%, 98%, 99%, or 100% sequence similarity to an amino acid sequence selected from the group consisting of SEQ ID NOs: 49 to 68, 116 to 130, and 147. In other aspects, the present disclosure provides a biologically active variant of a protein having an amino acid sequence selected from the group consisting of SEQ ID NOs: 49 to 68, 116 to 130, and 147. A biologically active variant of a protein of the present disclosure may differ from that protein by as few as 1-15 amino acid residues, as few as 10, as few as 9, as few as 8, as few as 7, as few as 6, as few as 5, as few as 4, as few as 3, as few as 2, or as few as 1 amino acid residue. Also provided herein are orthologous genes or proteins of genes or proteins from Nic1 locus. “Orthologs” are genes derived from a common ancestral gene and which are found in different species as a result of speciation. Orthologs may share at least 60%, 70%, 75%, 80%, 85%, 90%, 91%, 92%, 93%, 94%, 95%, 96%, 97%, 98%, 99%, or greater sequence identity or similarity at the nucleotide sequence and/or the protein sequence level. Functions of orthologs are often highly conserved among species.

[0192] As used herein, the term “sequence identity” or “identity” in the context of two polynucleotides or polypeptide sequences makes reference to the residues in the two sequences that are the same when aligned for maximum correspondence over a specified comparison window. When percentage of sequence identity is used in reference to proteins it is recognized that residue positions which are not identical often differ by conservative amino acid substitutions, where amino acid residues are substituted for other amino acid residues with similar chemical properties (e.g., charge or hydrophobicity) and therefore do not change the functional properties of the molecule. When sequences differ in conservative substitutions, the percent sequence identity may be adjusted upwards to correct for the conservative nature of the substitution. Sequences that differ by such conservative substitutions are said to have “sequence similarity” or “similarity.”

[0193] Nucleic acid molecules, polypeptides, or proteins provided herein can be isolated or substantially purified. An “isolated” or “purified” nucleic acid molecule, polypeptide, protein, or biologically active portion thereof, is substantially or essentially free from components that normally accompany or interact with the polynucleotide or protein as found in its naturally occurring environment. For example, an isolated or purified polynucleotide or protein is substantially free of other cellular material, or culture medium when produced by recombinant techniques, or substantially free of chemical precursors or other chemicals when chemically synthesized.

[0194] The present disclosure further provides a method manufacturing a tobacco product comprising tobacco material from tobacco plants disclosed herein. In some aspects, methods disclosed herein comprise conditioning aged tobacco material made from tobacco plants disclosed herein to increase its moisture content from between about 12.5% and about 13.5% to about 21%, blending the conditioned tobacco material to produce a desirable blend. In one aspect, the method of manufacturing a tobacco product disclosed herein further comprises casing or flavoring the blend. Generally, during the casing process, casing or sauce materials are added to blends to enhance their quality by balancing the chemical composition and to develop certain desired flavor characteristics. Further details for the casing process can be found in Tobacco Production, Chemistry and Technology, Edited by L. Davis and M. Nielsen, Blackwell Science, 1999.

[0195] Tobacco material provided herein can be also processed using methods including, but not limited to, heat treatment (e.g., cooking, toasting), flavoring, enzyme treatment, expansion and/or curing. Both fermented and non-fermented tobaccos can be processed using these techniques. Examples of suitable processed tobaccos include dark air-cured, dark fire cured, burley, flue cured, and cigar filler or wrapper, as well as the products from the whole leaf stemming operation. In some aspects, tobacco fibers include up to 70% dark tobacco on a fresh weight basis. For example, tobacco can be conditioned by heating, sweating and/or pasteurizing steps as described in U.S. Publication Nos. 2004/0118422 or 2005/0178398.

[0196] Tobacco material provided herein can be subject to fermentation. Fermenting typically is characterized by high initial moisture content, heat generation, and a 10 to 20% loss of dry weight. See, e.g., U.S. Patent Nos. 4,528,993; 4,660,577; 4,848,373; and 5,372,149. In addition to modifying the aroma of the leaf, fermentation can change either or both the color and texture of a leaf Also during the fermentation process, evolution gases can be produced, oxygen can be taken up, the pH can change, and the amount of water retained can change. See, for example, U.S. Publication No. 2005/0178398 and Tso (1999, Chapter 1 in Tobacco, Production, Chemistry and Technology, Davis & Nielsen, eds., Blackwell Publishing, Oxford). Cured, or cured and fermented tobacco can be further processed (e.g., cut, expanded, blended, milled or comminuted) prior to incorporation into the oral product. The tobacco, in some cases, is long cut fermented cured moist tobacco having an oven volatiles content of between 48 and 50 weight percent prior to mixing with the copolymer and optionally flavorants and other additives.

[0197] In some aspects, tobacco material provided herein can be processed to a desired size. In certain aspects, tobacco fibers can be processed to have an average fiber size of less than 200 micrometers. In some aspects, tobacco fibers are between 75 and 125 micrometers. In other aspects, tobacco fibers are processed to have a size of 75 micrometers or less. In some aspects, tobacco fibers include long cut tobacco, which can be cut or shredded into widths of about 10 cuts/inch up to about 110 cuts/inch and lengths of about 0.1 inches up to about 1 inch. Double cut tobacco fibers can have a range of particle sizes such that about 70% of the double cut tobacco fibers falls between the mesh sizes of −20 mesh and 80 mesh.

[0198] Tobacco material provided herein can be processed to have a total oven volatiles content of about 10% by weight or greater; about 20% by weight or greater; about 40% by weight or greater; about 15% by weight to about 25% by weight; about 20% by weight to about 30% by weight; about 30% by weight to about 50% by weight; about 45% by weight to about 65% by weight; or about 50% by weight to about 60% by weight. Those of skill in the art will appreciate that “moist” tobacco typically refers to tobacco that has an oven volatiles content of between about 40% by weight and about 60% by weight (e.g., about 45% by weight to about 55% by weight, or about 50% by weight). As used herein, “oven volatiles” are determined by calculating the percentage of weight loss for a sample after drying the sample in a pre-warmed forced draft oven at 110° C. for 3.25 hours. The oral product can have a different overall oven volatiles content than the oven volatiles content of the tobacco fibers used to make the oral product. The processing steps described herein can reduce or increase the oven volatiles content.

[0199] The following paragraphs provide a list of exemplary embodiments.

[0200] Embodiment 1. A tobacco plant, or part thereof, comprising a mutation in Nic1 locus, a mutation in Nic2 locus, or both, wherein said tobacco plant is capable of producing leaves having a USDA grade index value of 50 or more.

[0201] Embodiment 2. The tobacco plant, or part thereof, of Embodiment 1, wherein said tobacco plant is capable of producing leaves having a USDA grade index value selected from the group consisting of 55 or more, 60 or more, 65 or more, 70 or more, 75 or more, 80 or more, 85 or more, 90 or more, and 95 or more.

[0202] Embodiment 3. The tobacco plant, or part thereof, of Embodiment 1, wherein said tobacco plant is capable of producing leaves having a USDA grade index value comparable to that of a control plant when grown in similar growth conditions, wherein said control plant shares an essentially identical genetic background with said tobacco plant except said mutation.

[0203] Embodiment 4. The tobacco plant, or part thereof, of Embodiment 1, wherein said tobacco plant is capable of producing leaves having a USDA grade index value of at least about 65%, at least about 70%, at least about 75%, at least about 80%, at least about 85%, at least about 90%, at least about 95%, or at least about 98% of the USDA grade index value of a control plant when grown in similar growth conditions, wherein said control plant shares an essentially identical genetic background with said tobacco plant except said mutation.

[0204] Embodiment 6. The tobacco plant, or part thereof, of Embodiment 1, wherein said tobacco plant comprises a nicotine level selected from the group consisting of less than 3%, less than 2.75%, less than 2.5%, less than 2.25%, less than 2.0%, less than 1.75%, less than 1.5%, less than 1.25%, less than 1%, less than 0.9%, less than 0.8%, less than 0.7%, less than 0.6%, less than 0.5%, less than 0.4%, less than 0.3%, less than 0.2%, less than 0.1%, and less than 0.05%.

[0205] Embodiment 7. The tobacco plant, or part thereof, of Embodiment 1, wherein said tobacco plant further comprises a transgene or mutation directly suppressing the expression or activity of one or more genes encoding a product selected from the group consisting of PMT, MPO, QPT, BBL, A622, and MATE transporter.

[0206] Embodiment 8. A tobacco plant, or part thereof, comprising a mutation in Nic1 locus, a mutation in Nic2 locus, or both, wherein said tobacco plant is capable of producing leaves having a USDA grade index value comparable to that of a control plant when grown in similar growth conditions, wherein said control plant shares an essentially identical genetic background with said tobacco plant except said mutation.

[0207] Embodiment 9. The tobacco plant, or part thereof, of Embodiment 8, wherein said tobacco plant is capable of producing leaves having a USDA grade index value selected from the group consisting of 55 or more, 60 or more, 65 or more, 70 or more, 75 or more, 80 or more, 85 or more, 90 or more, and 95 or more.

[0208] Embodiment 10. The tobacco plant, or part thereof, of Embodiment 8, wherein said tobacco plant is capable of producing leaves having a USDA grade index value of at least about 65%, at least about 70%, at least about 75%, at least about 80%, at least about 85%, at least about 90%, at least about 95%, or at least about 98% of the grading index of said control plant.

[0209] Embodiment 11. The tobacco plant, or part thereof, of Embodiment 8, wherein said tobacco plant comprises nicotine at a level below 1%, below 2%, below 5%, below 8%, below 10%, below 12%, below 15%, below 20%, below 25%, below 30%, below 40%, below 50%, below 60%, below 70%, or below 80% of the nicotine level of said control plant when grown in similar growth conditions.

[0210] Embodiment 12. The tobacco plant, or part thereof, of Embodiment 8, wherein said tobacco plant further comprises a transgene or mutation directly suppressing the expression or activity of one or more genes encoding a product selected from the group consisting of PMT, MPO, QPT, BBL, A622, and MATE transporter.

[0211] Embodiment 13. A plant of a tobacco variety comprising a mutation selected from the group consisting of a nic1 mutation, a nic2 mutation, and a combination thereof, wherein said tobacco variety has a leaf grading index comparable to the leaf grading index of a control tobacco variety when grown in similar growth conditions, wherein said control tobacco variety shares an essentially identical genetic background with said tobacco variety except said mutation.

[0212] Embodiment 14. A non-transgenic tobacco plant, or part thereof, comprising a nicotine level selected from the group consisting of less than 3%, less than 2.75%, less than 2.5%, less than 2.25%, less than 2.0%, less than 1.75%, less than 1.5%, less than 1.25%, less than 1%, less than 0.9%, less than 0.8%, less than 0.7%, less than 0.6%, less than 0.5%, less than 0.4%, less than 0.3%, less than 0.2%, less than 0.1%, and less than 0.05%, wherein said tobacco plant is capable of producing leaves having a USDA grade index value of 50 or more 55 or more, 60 or more, 65 or more, 70 or more, 75 or more, 80 or more, 85 or more, 90 or more, and 95 or more.

[0213] Embodiment 15. The non-transgenic tobacco plant, or part thereof, of claim 14, wherein said non-transgenic tobacco plant comprises a nicotine level of less than 2.0% and is capable of producing leaves having a USDA grade index value of 70 or more.

[0214] Embodiment 16. The non-transgenic tobacco plant, or part thereof, of claim 14, wherein said non-transgenic tobacco plant comprises a nicotine level of less than 1.0% and is capable of producing leaves having a USDA grade index value of 70 or more.

[0215] Embodiment 17. A tobacco plant, or part thereof, comprising a non-transgenic mutation, wherein said non-transgenic mutation reduces the nicotine level of said tobacco plant to below 1%, below 2%, below 5%, below 8%, below 10%, below 12%, below 15%, below 20%, below 25%, below 30%, below 40%, below 50%, below 60%, below 70%, or below 80% of the nicotine level of a control plant when grown in similar growth conditions, wherein said tobacco plant is capable of producing leaves having a USDA grade index value comparable to the USDA grade index value of said control plant, and wherein said control plant shares an essentially identical genetic background with said tobacco plant except said non-transgenic mutation.

[0216] Embodiment 18. A population of the tobacco plants of any one of Embodiments 1 to 17.

[0217] Embodiment 19. Cured tobacco material from the tobacco plant of any one of claims 1 to 17.

[0218] Embodiment 20. The cured tobacco material of Embodiment 19, wherein said cured tobacco material is made by a curing process selected from the group consisting of flue curing, air curing, fire curing, and sun curing.

[0219] Embodiment 21. A tobacco blend comprising the cured tobacco material of claim 19.

[0220] Embodiment 22. The tobacco blend of Embodiment 21, wherein the cured tobacco material constitutes about at least 10%, at least 15%, at least 20%, at least 25%, at least 30%, at least 35%, at least 40%, at least 45%, at least 50%, at least 55%, at least 60%, at least 65%, at least 70%, at least 75%, at least 80%, at least 85%, at least 90%, or at least 95% of cured tobacco in said tobacco blend by weight.

[0221] Embodiment 23. The tobacco blend of Embodiment 21, wherein the cured tobacco material constitutes about at least 10%, at least 15%, at least 20%, at least 25%, at least 30%, at least 35%, at least 40%, at least 45%, at least 50%, at least 55%, at least 60%, at least 65%, at least 70%, at least 75%, at least 80%, at least 85%, at least 90%, or at least 95% of cured tobacco in said tobacco blend by volume.

[0222] Embodiment 24. A tobacco product comprising the cured tobacco material of claim 19.

[0223] Embodiment 25. The tobacco product of Embodiment 24, wherein the tobacco product is selected from the group consisting of a cigarette, a cigarillo, a non-ventilated recess filter cigarette, a vented recess filter cigarette, a cigar, snuff, pipe tobacco, cigar tobacco, cigarette tobacco, chewing tobacco, leaf tobacco, shredded tobacco, and cut tobacco.

[0224] Embodiment 26. The tobacco product of Embodiment 24, wherein the tobacco product is a smokeless tobacco product.

[0225] Embodiment 27. The tobacco product of Embodiment 26, wherein the smokeless tobacco product is selected from the group consisting of loose leaf chewing tobacco, plug chewing tobacco, moist snuff, and nasal snuff

[0226] Embodiment 28. A reconstituted tobacco comprising the cured tobacco material of claim 19.

[0227] Embodiment 29. A tobacco plant, or part thereof, comprising a mutation in Nic1 locus, wherein said mutation is absent from a LA Burley 21 variety.

[0228] Embodiment 30. The tobacco plant, or part thereof, of Embodiment 29, wherein said tobacco plant comprises a shorter chromosome deletion at Nic1 locus compared to said LA Burley 21 variety.

[0229] Embodiment 31. The tobacco plant, or part thereof, of Embodiment 29, wherein said tobacco plant comprises a lower level of nicotine compared to a control tobacco plant without said mutation when grown in similar growth conditions.

[0230] Embodiment 32. The tobacco plant, or part thereof, of Embodiment 29, wherein said tobacco plant comprises nicotine at a level below 1%, below 2%, below 5%, below 8%, below 10%, below 12%, below 15%, below 20%, below 25%, below 30%, below 40%, below 50%, below 60%, below 70%, or below 80% of the nicotine level in a control tobacco plant without said mutation when grown in similar growth conditions.

[0231] Embodiment 33. The tobacco plant, or part thereof, of Embodiment 29, wherein said tobacco plant comprises a lower level of total alkaloid compared to a control tobacco plant without said mutation when grown in similar growth conditions.

[0232] Embodiment 34. The tobacco plant, or part thereof, of Embodiment 29, wherein said tobacco plant comprises a lower level of one or more alkaloid selected from the group consisting of nicotine, nornicotine, anabasine, and anatabine, compared to a control tobacco plant without said mutation when grown in similar growth conditions.

[0233] Embodiment 35. The tobacco plant, or part thereof, of Embodiment 29, wherein said tobacco plant comprises a similar level of one or more compounds selected from the group consisting of 3-methylvaleric acid, valeric acid, isovaleric acid, a labdenoid, a cembrenoid, a sugar ester, and a reducing sugar, compared to a control tobacco plant without said mutation when grown in similar growth conditions.

[0234] Embodiment 36. The tobacco plant, or part thereof, of Embodiment 29, wherein said mutation is homozygous.

[0235] Embodiment 37. The tobacco plant, or part thereof, of Embodiment 29, wherein said mutation is heterozygous.

[0236] Embodiment 38. The tobacco plant, or part thereof, of Embodiment 29, wherein said mutation is selected from the group consisting of a point mutation, a deletion, an insertion, a duplication, and an inversion.

[0237] Embodiment 39. The tobacco plant, or part thereof, of Embodiment 29, wherein said mutation is introduced by an approach selected from the group consisting of random mutagenesis and targeted mutagenesis.

[0238] Embodiment 40. The tobacco plant, or part thereof, of Embodiment 39, wherein said targeted mutagenesis is mediated by meganuclease, zinc finger nuclease, TALEN, or CRISPR.

[0239] Embodiment 41. The tobacco plant, or part thereof, of Embodiment 29, wherein said tobacco plant further comprises a mutation in Nic2 locus.

[0240] Embodiment 42. The tobacco plant, or part thereof, of Embodiment 29, wherein said mutation is located within a gene comprising a sequence having at least 80%, at least 85%, at least 90%, at least 95%, at least 97%, at least 98%, at least 99% identity to a sequence selected from the group consisting of SEQ ID NOs: 9 to 28, 75 to 82, 86 to 100, 145, and fragments thereof.

[0241] Embodiment 43. The tobacco plant, or part thereof, of Embodiment 29, wherein said mutation reduces the expression or activity of said gene.

[0242] Embodiment 44. The tobacco plant, or part thereof, of Embodiment 29, wherein said mutation is located within a gene comprising a sequence having at least 80%, at least 85%, at least 90%, at least 95%, at least 97%, at least 98%, at least 99% identity to a sequence selected from the group consisting of SEQ ID NOs: 13, 28, 33, 48, 82, 86, 87, 101, 102, 145, and 146, and fragments thereof.

[0243] Embodiment 45. The tobacco plant, or part thereof, of Embodiment 29, wherein said mutation is located within a sequence having at least 80%, at least 85%, at least 90%, at least 95%, at least 97%, at least 98%, at least 99% identity to a sequence selected from the group consisting of SEQ ID NOs: 13, 28, 33, 48, 82, 86, 87, 101, 102, 145, and 146, and fragments thereof.

[0244] Embodiment 46. The tobacco plant, or part thereof, of Embodiment 29, wherein said mutation is located within a gene comprising a coding sequence having at least 80%, at least 85%, at least 90%, at least 95%, at least 97%, at least 98%, at least 99% identity to a sequence selected from the group consisting of SEQ ID NOs: 33, 48, 101, 102, and 146, and fragments thereof.

[0245] Embodiment 47. The tobacco plant, or part thereof, of Embodiment 29, wherein said mutation is located within a sequence having at least 80%, at least 85%, at least 90%, at least 95%, at least 97%, at least 98%, at least 99% identity to a sequence selected from the group consisting of SEQ ID NOs: 33, 48, 101, 102, and 146, and fragments thereof.

[0246] Embodiment 48. The tobacco plant, or part thereof, of Embodiment 29, wherein said mutation is located within a gene encoding a polypeptide having at least 80%, at least 85%, at least 90%, at least 95%, at least 97%, at least 98%, at least 99% identity to a sequence selected from the group consisting of SEQ ID NOs: 53, 68, 116, 117, 147, and fragments thereof.

[0247] Embodiment 49. The tobacco plant, or part thereof, of Embodiment 29, wherein said plant further comprises a reduced level of mRNA, protein, or both of one or more genes encoding a product selected from the group consisting of PMT, MPO, QPT, BBL, MATE, and A622, compared to a tobacco plant without said mutation when grown in similar growth conditions.

[0248] Embodiment 50. The tobacco plant, or part thereof, of Embodiment 29, wherein said plant further comprises a transgene or mutation suppressing the expression or activity of one or more genes encoding a product selected from the group consisting of PMT, MPO, QPT, BBL, A622, and MATE transporter.

[0249] Embodiment 51. The tobacco plant, or part thereof, of Embodiment 29, wherein said tobacco plant is a hybrid.

[0250] Embodiment 52. The tobacco plant, or part thereof, of Embodiment 29, wherein said part is selected from the group consisting of a leaf, a stem, a root, a seed, a flower, pollen, an anther, an ovule, a pedicel, a fruit, a meristem, a cotyledon, a hypocotyl, a pod, an embryo, endosperm, an explant, a callus, a tissue culture, a shoot, a cell, and a protoplast.

[0251] Embodiment 53. The tobacco plant, or part thereof, of Embodiment 29, wherein said tobacco plant is from a variety selected from the group consisting of flue-cured tobacco, air-cured tobacco, dark fire-cured tobacco, and Galpao tobacco, and Oriental tobacco.

[0252] Embodiment 54. The tobacco plant, or part thereof, of Embodiment 29, wherein said tobacco plant is from a variety selected from the group consisting of Burley tobacco, Maryland tobacco, and dark air-cured tobacco.

[0253] Embodiment 55. A population of the tobacco plants of Embodiment 29.

[0254] Embodiment 56. Cured tobacco material from the tobacco plant of Embodiment 29.

[0255] Embodiment 57. The cured tobacco material of Embodiment 56, wherein said cured tobacco material comprises a lower level of nicotine compared to cured tobacco material from a control tobacco plant without said mutation.

[0256] Embodiment 58. The cured tobacco material of Embodiment 56, wherein said tobacco plant comprises nicotine at a level between 0.2% and 0.6%.

[0257] Embodiment 59. The cured tobacco material of Embodiment 56, wherein said tobacco plant comprises nicotine at a level between 1.0% and 3.0%.

[0258] Embodiment 60. The cured tobacco material of Embodiment 56, wherein said cured tobacco material is made by a curing process selected from the group consisting of flue curing, air curing, fire curing, and sun curing.

[0259] Embodiment 61. A tobacco blend comprising the cured tobacco material of claim 56.

[0260] Embodiment 62. A tobacco product comprising the cured tobacco material of claim 56.

[0261] Embodiment 63. The tobacco product of Embodiment 62, wherein the tobacco product is selected from the group consisting of a cigarette, a cigarillo, a non-ventilated recess filter cigarette, a vented recess filter cigarette, a cigar, snuff, pipe tobacco, cigar tobacco, cigarette tobacco, chewing tobacco, leaf tobacco, shredded tobacco, and cut tobacco.

[0262] Embodiment 64. The tobacco product of Embodiment 62, wherein the tobacco product is a smokeless tobacco product.

[0263] Embodiment 65. The tobacco product of Embodiment 64, wherein the smokeless tobacco product is selected from the group consisting of loose leaf chewing tobacco, plug chewing tobacco, moist snuff, and nasal snuff

[0264] Embodiment 66. A reconstituted tobacco comprising the cured tobacco material of claim 56.

[0265] Embodiment 67. A recombinant DNA construct comprising a promoter that is functional in a tobacco cell and operably linked to a polynucleotide that encodes a polypeptide having an amino acid sequence at least 80%, at least 85%, at least 90%, at least 95%, at least 97%, at least 98%, at least 99% identical to an amino acid sequence selected from the group consisting of SEQ ID NOs: 49 to 68, 84, 116 to 130, 147, and fragments thereof.

[0266] Embodiment 68. A tobacco plant, or part thereof, comprising the recombinant DNA construct of claim 67.

[0267] Embodiment 69. A tobacco plant, or part thereof, of Embodiment 68, wherein said tobacco plant comprises a higher level of nicotine compared to a control tobacco plant without said recombinant DNA construct.

[0268] Embodiment 70. Cured tobacco material from the tobacco plant of Embodiment 68.

[0269] Embodiment 71. A tobacco product comprising the cured tobacco material of claim 70.

[0270] Embodiment 72. A method of increasing the nicotine level of a tobacco plant, said method comprising transforming a tobacco plant with the recombinant DNA construct of claim 67.

[0271] Embodiment 73. A recombinant DNA construct comprising a promoter that is functional in a tobacco cell and operably linked to a polynucleotide that encodes an RNA molecule capable of binding to an RNA encoding a polypeptide having an amino acid sequence at least 80%, at least 85%, at least 90%, at least 95%, at least 97%, at least 98%, at least 99% identical to an amino acid sequence selected from the group consisting of SEQ ID NO: 49 to 68, 84, 116 to 130, 147, and fragments thereof, and wherein said RNA molecule suppresses the expression of said polypeptide.

[0272] Embodiment 74. A tobacco plant, or part thereof, comprising the recombinant DNA construct of claim 73.

[0273] Embodiment 75. The tobacco plant, or part thereof, of Embodiment 74, wherein said RNA molecule is selected from the group consisting of a microRNA, an siRNA, and a trans-acting siRNA.

[0274] Embodiment 76. The tobacco plant, or part thereof, of Embodiment 74, wherein said polynucleotide encodes a double stranded RNA.

[0275] Embodiment 77. The tobacco plant, or part thereof, of Embodiment 74, wherein said tobacco plant comprises a lower level of nicotine compared to a control tobacco plant without said recombinant DNA construct.

[0276] Embodiment 78. Cured tobacco material from the tobacco plant of Embodiment 74.

[0277] Embodiment 79. A tobacco product comprising the cured tobacco material of claim 78.

[0278] Embodiment 80. A method of reducing the nicotine level of a tobacco plant, said method comprising transforming a tobacco plant with the recombinant DNA construct of claim 73.

[0279] Embodiment 81. A tobacco plant, or part thereof, comprising a heterologous expression cassette comprising a Nic1 inhibitory sequence of a gene comprising a sequence selected from the group consisting of SEQ ID NOs: 9 to 28, 75 to 82, 86 to 100, 145, and fragments thereof, wherein said inhibitory sequence is operably linked to a promoter that is functional in a plant cell, and wherein said inhibitory sequence has at least 90% sequence identity to a fragment of at least 21, 22, 23, 24, 25, 26, 27, 28, 29, 30, 31, 32, 33, 34, 35, 36, 37, 38, 39, 40, 41, 42, 43, 44, 45, 46, 47, 48, 49, 50, 51, 52, 53, 54, 55, 56, 57, 58, 59, 60, 61, 62, 63, 64, 65, 66, 67, 68, 69, 70, 71,72, 73, 74, 75, 76, 77, 78, 79, or 80 nucleotides of sequence selected from the group consisting of SEQ ID NOs: 9 to 28, 75 to 82, 86 to 100, 145, and fragments thereof.

[0280] Embodiment 82. The tobacco plant, or part thereof, of Embodiment 81, wherein said Nic1 inhibitory sequence is capable of being transcribed as an inhibitory polynucleotide selected from the group consisting of a single-stranded RNA polynucleotide, a double-stranded RNA polynucleotide, and a combination thereof.

[0281] Embodiment 83. The tobacco plant, or part thereof, of Embodiment 81, wherein said promoter is selected from the group consisting of a constitutive promoter, an inducible promoter, and a tissue-preferred promoter.

[0282] Embodiment 84. The tobacco plant, or part thereof, of Embodiment 81, wherein said promoter is a root-specific promoter.

[0283] Embodiment 85. A tobacco plant, or part thereof, comprising a heterologous expression cassette comprising a Nic1 inhibitory sequence of a gene comprising a sequence selected from the group consisting of SEQ ID NOs: 13, 28, 33, 48, 82, 86, 87, 101, 102, 145, and 146, and fragments thereof, wherein said inhibitory sequence is operably linked to a promoter that is functional in a plant cell, and wherein said inhibitory sequence has at least 90% sequence identity to a fragment of at least 21, 22, 23, 24, 25, 26, 27, 28, 29, 30, 31, 32, 33, 34, 35, 36, 37, 38, 39, 40, 41, 42, 43, 44, 45, 46, 47, 48, 49, 50, 51, 52, 53, 54, 55, 56, 57, 58, 59, 60, 61, 62, 63, 64, 65, 66, 67, 68, 69, 70, 71,72, 73, 74, 75, 76, 77, 78, 79, or 80 nucleotides of sequence selected from the group consisting of SEQ ID NOs: 13, 28, 33, 48, 82, 86, 87, 101, 102, 145, and 146, and fragments thereof.

[0284] Embodiment 86. A method of introgressing a low nicotine trait into a tobacco variety, said method comprising:
[0285] a. crossing a first tobacco variety comprising a low nicotine trait with a second tobacco variety without said low nicotine trait to produce one or more progeny tobacco plants;
[0286] b. genotyping the one or more progeny tobacco plants for a polymorphic marker linked to said low nicotine trait, wherein said polymorphic marker is in a chromosomal interval flanked by any two of polymorphic loci listed in Table 3 or flanked by any two of polymorphic loci listed in Table 4; and
[0287] c. selecting a progeny tobacco plant comprising the low nicotine trait.

[0288] Embodiment 87. The method of Embodiment 86, wherein the method further comprises backcrossing said selected progeny tobacco plant with said second tobacco variety.

[0289] Embodiment 88. The method of Embodiment 86, wherein the method further comprises:
[0290] d. crossing the selected progeny plant with itself or with the second tobacco variety to produce one or more further progeny tobacco plants; and
[0291] e. selecting a further progeny tobacco plant comprising the low nicotine trait.

[0292] Embodiment 89. The method of Embodiment 88, wherein the step (e) of selecting comprises marker-assisted selection.

[0293] Embodiment 90. The method of Embodiment 86, wherein the method produces a single gene conversion comprising said low nicotine trait.

[0294] Embodiment 91. The method of Embodiment 86, wherein the second tobacco variety is an elite variety.

[0295] Embodiment 92. The method of Embodiment 86, wherein the genotyping involves one or more molecular marker assays.

[0296] Embodiment 93. The method of Embodiment 86, wherein the polymorphic marker comprises a polymorphism selected from the group consisting of single nucleotide polymorphisms (SNPs), insertions or deletions in DNA sequence (Indels), simple sequence repeats of DNA sequence (SSRs), a restriction fragment length polymorphism (RFLP), and a tag SNP.

[0297] Embodiment 94. The method of Embodiment 86, wherein the genotyping comprises assaying for the presence or absence of a nucleic acid sequence located within a sequence having at least 80%, at least 85%, at least 90%, at least 95%, at least 97%, at least 98%, at least 99% identity to a sequence selected from the group consisting of SEQ ID NOs: 9 to 28, 75 to 82, 86 to 100, 145, and fragments thereof.

[0298] Embodiment 95. The method of Embodiment 86, wherein the genotyping comprises assaying for the presence or absence of a nucleic acid sequence located within a sequence having at least 80%, at least 85%, at least 90%, at least 95%, at least 97%, at least 98%, at least 99% identity to a sequence selected from the group consisting of SEQ ID Nos: 13, 28, 33, 48, 82, 86, 87, 101, 102, 145, and 146, and fragments thereof.

[0299] Embodiment 96. The method of Embodiment 86, wherein the first tobacco variety is LA Burley 21.

[0300] Embodiment 97. The method of Embodiment 86, wherein the selected progeny tobacco plant comprises a shorter chromosome deletion at Nic1 locus compared to LA Burley 21.

[0301] Embodiment 98. A method of introgressing a low nicotine trait into a tobacco variety, said method comprising:
[0302] a. crossing a first tobacco variety comprising a low nicotine trait with a second tobacco variety without said low nicotine trait to produce one or more progeny tobacco plants;
[0303] b. genotyping the one or more progeny tobacco plants for a polymorphic marker linked to said low nicotine trait, wherein said polymorphic marker is within 20 cM of any one of polymorphic loci listed in Table 3 and Table 4, or is any one of SEQ ID Nos. 131 to 144; and
[0304] c. selecting a progeny tobacco plant comprising the low nicotine trait.

[0305] Embodiment 99. The method of Embodiment 98, wherein the genotyping comprises assaying for the presence or absence of a nucleic acid sequence located within a sequence having at least 80%, at least 85%, at least 90%, at least 95%, at least 97%, at least 98%, at least 99% identity to a sequence selected from the group consisting of SEQ ID NOs: 9 to 28, 75 to 82, 86 to 100, 145, and fragments thereof.

[0306] Embodiment 100. The method of Embodiment 98, wherein the genotyping comprises assaying for the presence or absence of a nucleic acid sequence located within a sequence having at least 80%, at least 85%, at least 90%, at least 95%, at least 97%, at least 98%, at least 99% identity to a sequence selected from the group consisting of SEQ ID NOs: 13, 28, 33, 48, 82, 86, 87, 101, 102, 145, and 146, and fragments thereof.

[0307] Embodiment 101. A method of selecting a tobacco plant having a low nicotine trait, said method comprising:
[0308] a. isolating nucleic acids from a collection of tobacco germplasm;
[0309] b. assaying the nucleic acids for one or more markers closely linked to Nic1 locus or Nic2 locus; and
[0310] c. selecting a tobacco plant having a low nicotine trait based on the marker assay.

[0311] Embodiment 102. The method of Embodiment 101, wherein the one or more markers are within about 20 cM, 10 cM, 5 cM, 4 cM, 3 cM, 2 cM, 1 cM, 0.5 cM, or less than 0.5 cM of any one of polymorphic loci listed in Table 3 and Table 4, or any one of SEQ ID Nos. 131 to 144.

[0312] Embodiment 103. The method of Embodiment 101, wherein the assaying comprises assaying for the presence or absence of a nucleic acid sequence located within a sequence having at least 80%, at least 85%, at least 90%, at least 95%, at least 97%, at least 98%, at least 99% identity to a sequence selected from the group consisting of SEQ ID NOs: 9 to 28, 75 to 82, 86 to 100, 145, and fragments thereof.

[0313] Embodiment 104. The method of Embodiment 101, wherein the assaying comprises assaying for the presence or absence of a nucleic acid sequence located within a sequence having at least 80%, at least 85%, at least 90%, at least 95%, at least 97%, at least 98%, at least 99% identity to a sequence selected from the group consisting of SEQ ID NOs: 13, 28, 33, 48, 82, 86, 87, 101, 102, 145, and 146, and fragments thereof.

[0314] Embodiment 105. The method of Embodiment 101, wherein the method further comprises determining the nicotine level of said selected plant to confirm said low nicotine trait.

[0315] Embodiment 106. The method of Embodiment 101, wherein the collection of tobacco germplasm is a haploid breeding population.

[0316] Embodiment 107. A tobacco plant, or part thereof, comprising a first chromosomal deletion flanked by and not comprising any two of Nic1 Marker Nos. 1 to 207, a second chromosomal deletion flanked by and not comprising any two of Nic2 Marker Nos. 1 to 340, or both said first and said second chromosomal deletions, wherein said tobacco plant is capable of producing leaves having a USDA grade index value of 50 or more, 55 or more, 60 or more, 65 or more, 70 or more, 75 or more, 80 or more, 85 or more, 90 or more, or 95 or more.

[0317] Embodiment 108. The tobacco plant, or part thereof, of Embodiment 107, wherein said tobacco plant comprises a nicotine level selected from the group consisting of less than 3%, less than 2.75%, less than 2.5%, less than 2.25%, less than 2.0%, less than 1.75%, less than 1.5%, less than 1.25%, less than 1%, less than 0.9%, less than 0.8%, less than 0.7%, less than 0.6%, less than 0.5%, less than 0.4%, less than 0.3%, less than 0.2%, less than 0.1%, and less than 0.05%.

[0318] Embodiment 109. The tobacco plant, or part thereof, of Embodiment 107, wherein said first chromosomal deletion is flanked by and not comprising any two of Nic1 Marker Nos. 1 to 20, 21 to 40, 41 to 60, 61 to 80, 81 to 100, 101 to 120, 121 to 140, 141 to 160, 161 to 180, 181 to 200, or 201 to 207.

[0319] Embodiment 110. The tobacco plant, or part thereof, of Embodiment 107, wherein said first chromosomal deletion is flanked by and not comprising any two of Nic1 Marker Nos. 1 to 10, 11 to 20, 21 to 30, 31 to 40, 41 to 50, 51 to 60, 61 to 70, 71 to 80, 81 to 90, 91 to 100, 101 to 110, 111 to 120, 121 to 130, 131 to 140, 141 to 150, 151 to 160, 161 to 170, 171 to 180, 181 to 190, 191 to 200, or 201 to 207.

[0320] Embodiment 111. The tobacco plant, or part thereof, of Embodiment 107, wherein said second chromosomal deletion is flanked by and not comprising any two of Nic2 Marker Nos. 1 to 20, 21 to 40, 41 to 60, 61 to 80, 81 to 100, 101 to 120, 121 to 140, 141 to 160, 161 to 180, 181 to 200, 201 to 220, 221 to 240, 241 to 260, 261 to 280, 281 to 300, 301 to 320, or 321 to 340.

[0321] Embodiment 112. The tobacco plant, or part thereof, of Embodiment 107, wherein said second chromosomal deletion is flanked by and not comprising any two of Nic2 Marker Nos. 1 to 10, 11 to 20, 21 to 30, 31 to 40, 41 to 50, 51 to 60, 61 to 70, 71 to 80, 81 to 90, 91 to 100, 101 to 110, 111 to 120, 121 to 130, 131 to 140, 141 to 150, 151 to 160, 161 to 170, 171 to 180, 181 to 190, 191 to 200, 201 to 210, 211 to 220, 221 to 230, 231 to 240, 241 to 250, 251 to 260, 261 to 270, 271 to 280, 281 to 290, 291 to 300, 301 to 310, 311 to 320, 321 to 330, or 331 to 340.

[0322] Embodiment 113. A tobacco plant, or part thereof, comprising a mutation selected from the group consisting of a first chromosomal deletion flanked by and not comprising any two of Nic1 Marker Nos. 1 to 207, a second chromosomal deletion flanked by and not comprising any two of Nic2 Marker Nos. 1 to 340, and both said first and said second chromosomal deletions, wherein said tobacco plant is capable of producing leaves having a USDA grade index value comparable to that of a control plant when grown in similar growth conditions, wherein said control plant shares an essentially identical genetic background with said tobacco plant except said mutation.

[0323] Embodiment 114. The tobacco plant, or part thereof, of Embodiment 113, wherein said tobacco plant comprises nicotine at a level below 1%, below 2%, below 5%, below 8%, below 10%, below 12%, below 15%, below 20%, below 25%, below 30%, below 40%, below 50%, below 60%, below 70%, or below 80% of the nicotine level of said control plant when grown in similar growth conditions.

[0324] Embodiment 115. A population of the tobacco plants of any one of Embodiments 107 to 114.

[0325] Embodiment 116. Cured tobacco material from the tobacco plant of any one of claims 107 to 114.

[0326] Embodiment 117. The cured tobacco material of Embodiment 116, wherein said cured tobacco material is made by a curing process selected from the group consisting of flue curing, air curing, fire curing, and sun curing.

[0327] Embodiment 118. A tobacco blend comprising the cured tobacco material of claim 116.

[0328] Embodiment 119. The tobacco blend of Embodiment 118, wherein the cured tobacco material constitutes about at least 10%, at least 15%, at least 20%, at least 25%, at least 30%, at least 35%, at least 40%, at least 45%, at least 50%, at least 55%, at least 60%, at least 65%, at least 70%, at least 75%, at least 80%, at least 85%, at least 90%, or at least 95% of cured tobacco in said tobacco blend by weight.

[0329] Embodiment 120. The tobacco blend of Embodiment 118, wherein the cured tobacco material constitutes about at least 10%, at least 15%, at least 20%, at least 25%, at least 30%, at least 35%, at least 40%, at least 45%, at least 50%, at least 55%, at least 60%, at least 65%, at least 70%, at least 75%, at least 80%, at least 85%, at least 90%, or at least 95% of cured tobacco in said tobacco blend by volume.

[0330] Embodiment 121. A tobacco product comprising the cured tobacco material of claim 116.

[0331] Embodiment 122. The tobacco product of Embodiment 121, wherein the tobacco product is selected from the group consisting of a cigarette, a cigarillo, a non-ventilated recess filter cigarette, a vented recess filter cigarette, a cigar, snuff, pipe tobacco, cigar tobacco, cigarette tobacco, chewing tobacco, leaf tobacco, shredded tobacco, and cut tobacco.

[0332] Embodiment 123. The tobacco product of Embodiment 121, wherein the smokeless tobacco product is selected from the group consisting of loose leaf chewing tobacco, plug chewing tobacco, moist snuff, and nasal snuff.

[0333] Having now generally described the disclosure, the same will be more readily understood through reference to the following examples that are provided by way of illustration, and are not intended to be limiting of the present disclosure, unless specified.

### EXAMPLES

### Example 1

### Whole Genome Sequencing of Tobacco Lines having Low Alkaloid

[0334] Whole genome sequencing was used to determine the genetic lesion underlying the nic1 mutation in Low Alkaloid (LA) Burley 21. Four tobacco lines were sequenced. These are LA Burley 21 (nic1 nic2, Average nicotine˜0.3% on a dry weight basis (Range˜0.2-0.6%)), Low Intermediate (LI) Burley 21 (nic1 Nic2, Average nicotine˜2.3% (Range˜1.5-3.0%)), High Intermediate (HI) Burley 21(Nic1 nic2, Average nicotine ˜3.7% (Range˜2.5-5.0%)), and wild-type Burley 21 (also referred to as “BU21”) (Nic1 Nic2, Average nicotine˜4.7% (Range˜4.0-6.0%)). LA Burley 21 (also referred to as “LA BU21”) is a low total alkaloid line produced by incorporation of a low alkaloid gene(s) from a Cuban cigar variety into Burley 21 through several backcrosses (Legg et al. 1970).

[0335] Genomic DNA samples were prepared from tobacco leaves. Green leaf tissue from three plants each belonging to BU21 and LA BU21, as well as the High and Low Intermediates (HI BU21 and LI BU21, respectively) were collected. The tissue was flash frozen in liquid nitrogen and stored at -80° C. The stored tissue was ground in liquid Nitrogen and equal amount of tissue from the three plants belonging to each of the four lines was pooled together (˜10 g total final weight) for sequencing.

[0336] DNA library preparation and sequencing were performed following standard industry protocols, which include, e.g., shearing of DNA to create paired end libraries with average insert size of 500 bp. The raw sequences were mapped to a proprietary TN90 genome, and Single Nucleotide Polymorphisms (SNPs) as well as Insertions and Deletions (InDels) were identified using a whole genome variant detection pipeline. The variant detection pipeline performs trimming and filtering of raw sequencing data based on sequence quality, followed by selection of reads with minimum length of 75 bp and maximum number of 2 unknown bases. These reads were then mapped to Altria's proprietary tobacco (TN90) genome using the software gaMap v2.0.0 (BETA). Only mapped reads with a quality score of at least 40 were further used in SNP and InDel detection using software gaVariant v.2.0.0 BETA. Only SNPs and InDels with a minimum variant quality of 37, genotype quality of 85 and a coverage depth of 7× were included for further analyses. The number of paired end sequencing reads, filtered reads, mapped reads, as well as percentage of mapped reads for each of the four lines are provided in Table 1. The mean coverage for the 4 varieties ranges between 22- 40×, which exceeds the recommended coverage for variant detection (approximately 20×). Table 2 provides details on the number of SNPs and InDels detected in each of the four lines.

TABLE 1
Whole-genome sequencing statistics of the four sequenced Burley lines.

| Sample | Raw reads | Reads filtered | reads mapped | % Filtered | % Mapped |
|---|---|---|---|---|---|
| BU21 | 1,030,266,578 | 987,988,031 | 815,146,282 | 95.9 | 82.51 |
| HI BU21 | 928,747,952 | 889,038,519 | 738,942,909 | 95.72 | 83.12 |
| LI BU21 | 838,709,526 | 800,400,171 | 663,625,600 | 95.43 | 82.91 |
| LA BU21 | 792,837,196 | 755,706,369 | 621,019,698 | 95.32 | 82.18 |
| Total | 3,590,561,252 | 3,433,133,090 | 2,838,734,489 | 95.59 | 82.68 |

TABLE 2
Genotyping statistics of the four sequenced Burley lines.

| Sample | SNPs | Insertions | Deletions | % SNPs | % Insertions | % Deletions |
|---|---|---|---|---|---|---|
| BU21 | 2,349,123 | 304,814 | 397,514 | 76.984 | 9.98915 | 13.02705 |
| HI BU21 | 2,253,395 | 292,635 | 386,493 | 76.842 | 9.97895 | 13.17954 |
| LI BU21 | 2,138,321 | 276,921 | 371,838 | 76.723 | 9.93588 | 13.34149 |
| LA BU21 | 2,083,729 | 265,561 | 358,655 | 76.949 | 9.80674 | 13.24455 |
| Total | 8,824,568 | 1,139,931 | 1,514,500 | 76.8745 | 9.92768 | 13.19816 |

### Example 2

### Analysis of the Genome Sequences to Identify Nic1 and Nic2 Loci

[0337] The genome sequences from Example 1 were analyzed to identify the nic1 and nic2 mutations in LA BU21. The sequences were first analyzed at Nic2 locus. The Nic 2 locus was previously reported by Shoji et. al (2010) to comprise a deletion of 7 Ethylene Response Factor (ERF) genes. These deleted ERF genes were mapped to a single contiguous region of the TN90 genome. We scanned the sequencing data of BU21, HI BU21, LI BU21 and LA BU21 and identified that the variant profile in this region of the genome consists of homozygous reference (TN90) allele genotypes across BU21 and LI BU21, and missing data across HI BU21 and LA BU21. This indicates that Nic2 deletion is represented in the variant genotypes as missing data.

[0338] Previous literature suggests that Nic1 and Nic2 loci likely contain duplicated genes each originating from one of the progenitor species, Nicotiana tomentosiformis or N. sylvestris (Hibi et al., 1994). Further, Shoji et al. (2010) reported that Nic2 locus is derived from N. tomentosiformis, and that nic2 is a deletion. The similar nature of their origin suggested that nic1 may also be a deletion. A custom perl script was written to detect a pattern of homozygous or heterozygous reference allele calls in BU21 and HI BU21, and missing data in LI BU21 and LA BU21. The custom peri script detected a total of 14035 scaffolds with nearly 37916 variants sites total that match the pattern of missing data in LA BU21 and LI BU21 and homozygous genotypes in HI BU21 and BU21. The mean number of variants observed per scaffold is nearly 3 (2.701). One contiguous region or scaffold (Scaffold0002504, SEQ ID No: 1) contains 207 variant sites with this pattern (Table 3). Hence, this outlier scaffold has 76.67 times the number of variants with the specified pattern compared to the mean number of variants across the remaining scaffolds. Scaffold0002504 provides the first indication of the location of Nic1 locus.

[0339] Based on the coverage of the reads across scaffolds, no sequencing bias was observed to account for the absence of reads in LI BU21 and LA BU21. Further, at the known Nic2 locus (Scaffold0000549, SEQ ID No: 2), a similar pattern was observed where LA BU21 and HI BU21 show missing data and BU21 and LI BU21 show homozygous reference allele calls (340 sites on Scaffold0000549 compared to 2.49 sites observed in all scaffolds exhibiting such a pattern of variant sites) (Table 4).

TABLE 3
Polymorphic sites in a Nic1 deletion segment,
NT1.0-Scaffold0002504. POS indicates the
nucleotide position of each polymorphic site on
Scaffold0002504. REF refers to the sequence of a
reference TN90 allele. ALT refers to a sequence
polymorphism found in K326, Narrow Leaf Madole,
or Oriental type. “0/0“ refers to homozygous
for the reference TN90 allele while “./.”
refers to missing data (e.g., deletion).

| Nic1 | | | | | | | |
|---|---|---|---|---|---|---|---|
| Marker | | | | | | | |
| No. | POS | REF | ALT | BU21 | HI | LI | LA |
| 1 | 240 | T | A | 0/0 | 0/0 | ./. | ./. |
| 2 | 1750 | CA | C | 0/0 | 0/0 | ./. | ./. |
| 3 | 2064 | G | A | 0/0 | 0/0 | ./. | ./. |
| 4 | 2671 | G | A | 0/0 | 0/0 | ./. | ./. |
| 5 | 2678 | G | T | 0/0 | 0/0 | ./. | ./. |
| 6 | 5174 | G | T | 0/0 | 0/0 | ./. | ./. |
| 7 | 5176 | A | C | 0/0 | 0/0 | ./. | ./. |
| 8 | 5781 | C | T | 0/0 | 0/0 | ./. | ./. |
| 9 | 5812 | A | G | 0/0 | 0/0 | ./. | ./. |
| 10 | 6312 | G | T | 0/0 | 0/0 | ./. | ./. |
| 11 | 6349 | T | G | 0/0 | 0/0 | ./. | ./. |
| 12 | 6373 | T | C | 0/0 | 0/0 | ./. | ./. |
| 13 | 8028 | T | G | 0/0 | 0/0 | ./. | ./. |
| 14 | 12004 | AT | A | 0/0 | 0/0 | ./. | ./. |
| 15 | 12668 | T | C | 0/0 | 0/0 | ./. | ./. |
| 16 | 12939 | A | G | 0/0 | 0/0 | ./. | ./. |
| 17 | 13171 | G | T | 0/0 | 0/0 | ./. | ./. |
| 18 | 13644 | G | T | 0/0 | 0/0 | ./. | ./. |
| 19 | 14078 | G | A | 0/0 | 0/0 | ./. | ./. |
| 20 | 14085 | T | C | 0/0 | 0/0 | ./. | ./. |
| 21 | 29126 | G | T | 0/0 | 0/0 | ./. | ./. |
| 22 | 46969 | G | A | 0/0 | 0/0 | ./. | ./. |
| 23 | 54856 | C | T | 0/0 | 0/0 | ./. | ./. |
| 24 | 54923 | T | C | 0/0 | 0/0 | ./. | ./. |
| 25 | 63743 | T | C | 0/0 | 0/0 | ./. | ./. |
| 26 | 69020 | G | T | 0/0 | 0/0 | ./. | ./. |
| 27 | 78215 | A | G | 0/0 | 0/0 | ./. | ./. |
| 28 | 87817 | T | G | 0/0 | 0/0 | ./. | ./. |
| 29 | 91989 | A | G | 0/0 | 0/0 | ./. | ./. |
| 30 | 92936 | C | G | 0/0 | 0/0 | ./. | ./. |
| 31 | 104894 | G | T | 0/0 | 0/0 | ./. | ./. |
| 32 | 108471 | A | G | 0/0 | 0/0 | ./. | ./. |
| 33 | 108492 | G | A | 0/0 | 0/0 | ./. | ./. |
| 34 | 108503 | A | C | 0/0 | 0/0 | ./. | ./. |
| 35 | 109907 | A | C | 0/0 | 0/0 | ./. | ./. |
| 36 | 112193 | A | T | 0/0 | 0/0 | ./. | ./. |
| 37 | 114778 | C | T | 0/0 | 0/0 | ./. | ./. |
| 38 | 114852 | C | T | 0/0 | 0/0 | ./. | ./. |
| 39 | 117178 | A | G | 0/0 | 0/0 | ./. | ./. |
| 40 | 123634 | G | A | 0/0 | 0/0 | ./. | ./. |
| 41 | 130508 | A | G | 0/0 | 0/0 | ./. | ./. |
| 42 | 130966 | T | C | 0/0 | 0/0 | ./. | ./. |
| 43 | 131000 | C | T | 0/0 | 0/0 | ./. | ./. |
| 44 | 131045 | C | A | 0/0 | 0/0 | ./. | ./. |
| 45 | 134007 | A | G | 0/0 | 0/0 | ./. | ./. |
| 46 | 134046 | A | G | 0/0 | 0/0 | ./. | ./. |
| 47 | 136601 | C | T | 0/0 | 0/0 | ./. | ./. |
| 48 | 136884 | GT | G | 0/0 | 0/0 | ./. | ./. |
| 49 | 150080 | G | A | 0/0 | 0/0 | ./. | ./. |
| 50 | 150585 | T | A | 0/0 | 0/0 | ./. | ./. |
| 51 | 153975 | T | C | 0/0 | 0/0 | ./. | ./. |
| 52 | 159146 | A | G | 0/0 | 0/0 | ./. | ./. |
| 53 | 162586 | C | T | 0/0 | 0/0 | ./. | ./. |
| 54 | 163446 | G | A | 0/0 | 0/0 | ./. | ./. |
| 55 | 163641 | T | C | 0/0 | 0/0 | ./. | ./. |
| 56 | 167356 | T | C | 0/0 | 0/0 | ./. | ./. |
| 57 | 171095 | A | T | 0/0 | 0/0 | ./. | ./. |
| 58 | 181539 | A | G | 0/0 | 0/0 | ./. | ./. |
| 59 | 182327 | C | T | 0/0 | 0/0 | ./. | ./. |
| 60 | 190959 | C | T | 0/0 | 0/0 | ./. | ./. |
| 61 | 198368 | G | A | 0/0 | 0/0 | ./. | ./. |
| 62 | 198393 | A | G | 0/0 | 0/0 | ./. | ./. |
| 63 | 204573 | G | C | 0/0 | 0/0 | ./. | ./. |
| 64 | 205220 | A | G | 0/0 | 0/0 | ./. | ./. |
| 65 | 205252 | C | T | 0/0 | 0/0 | ./. | ./. |
| 66 | 206301 | C | A | 0/0 | 0/0 | ./. | ./. |
| 67 | 206500 | G | A | 0/0 | 0/0 | ./. | ./. |
| 68 | 206634 | A | C | 0/0 | 0/0 | ./. | ./. |
| 69 | 207061 | A | G | 0/0 | 0/0 | ./. | ./. |
| 70 | 207101 | G | A | 0/0 | 0/0 | ./. | ./. |
| 71 | 207131 | T | G | 0/0 | 0/0 | ./. | ./. |
| 72 | 207181 | T | A | 0/0 | 0/0 | ./. | ./. |
| 73 | 207204 | C | G | 0/0 | 0/0 | ./. | ./. |
| 74 | 207512 | C | A | 0/0 | 0/0 | ./. | ./. |
| 75 | 208518 | A | C | 0/0 | 0/0 | ./. | ./. |
| 76 | 208522 | C | T | 0/0 | 0/0 | ./. | ./. |
| 77 | 208556 | T | C | 0/0 | 0/0 | ./. | ./. |
| 78 | 208572 | T | C | 0/0 | 0/0 | ./. | ./. |
| 79 | 209297 | T | C | 0/0 | 0/0 | ./. | ./. |
| 80 | 209315 | C | T | 0/0 | 0/0 | ./. | ./. |
| 81 | 209661 | C | T | 0/0 | 0/0 | ./. | ./. |
| 82 | 209674 | T | C | 0/0 | 0/0 | ./. | ./. |
| 83 | 210485 | T | G | 0/0 | 0/0 | ./. | ./. |
| 84 | 211269 | T | C | 0/0 | 0/0 | ./. | ./. |
| 85 | 216116 | C | T | 0/0 | 0/0 | ./. | ./. |
| 86 | 222130 | G | A | 0/0 | 0/0 | ./. | ./. |
| 87 | 224309 | G | T | 0/0 | 0/0 | ./. | ./. |
| 88 | 224568 | C | T | 0/0 | 0/0 | ./. | ./. |
| 89 | 232343 | C | T | 0/0 | 0/0 | ./. | ./. |
| 90 | 238580 | C | T | 0/0 | 0/0 | ./. | ./. |
| 91 | 239069 | T | A | 0/0 | 0/0 | ./. | ./. |
| 92 | 242812 | A | T | 0/0 | 0/0 | ./. | ./. |
| 93 | 243675 | A | G | 0/0 | 0/0 | ./. | ./. |
| 94 | 244449 | A | G | 0/0 | 0/0 | ./. | ./. |
| 95 | 244950 | T | C | 0/0 | 0/0 | ./. | ./. |
| 96 | 245176 | A | G | 0/0 | 0/0 | ./. | ./. |
| 97 | 254755 | G | A | 0/0 | 0/0 | ./. | ./. |
| 98 | 255169 | C | T | 0/0 | 0/0 | ./. | ./. |
| 99 | 259166 | G | A | 0/0 | 0/0 | ./. | ./. |
| 100 | 271206 | G | A | 0/0 | 0/0 | ./. | ./. |
| 101 | 272201 | T | C | 0/0 | 0/0 | ./. | ./. |
| 102 | 273944 | T | C | 0/0 | 0/0 | ./. | ./. |
| 103 | 276518 | C | T | 0/0 | 0/0 | ./. | ./. |
| 104 | 276838 | T | A | 0/0 | 0/0 | ./. | ./. |
| 105 | 281675 | G | T | 0/0 | 0/0 | ./. | ./. |
| 106 | 284726 | G | T | 0/0 | 0/0 | ./. | ./. |
| 107 | 286609 | C | T | 0/0 | 0/0 | ./. | ./. |
| 108 | 286915 | A | G | 0/0 | 0/0 | ./. | ./. |
| 109 | 286966 | T | A | 0/0 | 0/0 | ./. | ./. |
| 110 | 286987 | A | G | 0/0 | 0/0 | ./. | ./. |
| 111 | 293036 | A | G | 0/0 | 0/0 | ./. | ./. |
| 112 | 300478 | G | T | 0/0 | 0/0 | ./. | ./. |
| 113 | 300631 | C | T | 0/0 | 0/0 | ./. | ./. |
| 114 | 300759 | A | T | 0/0 | 0/0 | ./. | ./. |
| 115 | 301119 | G | A | 0/0 | 0/0 | ./. | ./. |
| 116 | 303538 | A | C | 0/0 | 0/0 | ./. | ./. |
| 117 | 304744 | A | G | 0/0 | 0/0 | ./. | ./. |
| 118 | 306236 | C | T | 0/0 | 0/0 | ./. | ./. |
| 119 | 308259 | C | A | 0/0 | 0/0 | ./. | ./. |
| 120 | 313448 | A | G | 0/0 | 0/0 | ./. | ./. |
| 121 | 317046 | C | G | 0/0 | 0/0 | ./. | ./. |
| 122 | 318876 | GGGGGGT | G | 0/0 | 0/0 | ./. | ./. |
| 123 | 320878 | G | T | 0/0 | 0/0 | ./. | ./. |
| 124 | 321339 | T | G | 0/0 | 0/0 | ./. | ./. |
| 125 | 321361 | A | G | 0/0 | 0/0 | ./. | ./. |
| 126 | 321363 | C | T | 0/0 | 0/0 | ./. | ./. |
| 127 | 321532 | A | C | 0/0 | 0/0 | ./. | ./. |
| 128 | 324556 | A | G | 0/0 | 0/0 | ./. | ./. |
| 129 | 324990 | G | A | 0/0 | 0/0 | ./. | ./. |
| 130 | 329545 | T | A | 0/0 | 0/0 | ./. | ./. |
| 131 | 349886 | T | C | 0/0 | 0/0 | ./. | ./. |
| 132 | 350146 | A | C | 0/0 | 0/0 | ./. | ./. |
| 133 | 350163 | A | G | 0/0 | 0/0 | ./. | ./. |
| 134 | 350515 | T | G | 0/0 | 0/0 | ./. | ./. |
| 135 | 351620 | A | C | 0/0 | 0/0 | ./. | ./. |
| 136 | 353656 | A | G | 0/0 | 0/0 | ./. | ./. |
| 137 | 354639 | CT | C | 0/0 | 0/0 | ./. | ./. |
| 138 | 366150 | AG | A | 0/0 | 0/0 | ./. | ./. |
| 139 | 388388 | T | G | 0/0 | 0/0 | ./. | ./. |
| 140 | 390555 | G | A | 0/0 | 0/0 | ./. | ./. |
| 141 | 391708 | C | T | 0/0 | 0/0 | ./. | ./. |
| 142 | 392358 | G | C | 0/0 | 0/0 | ./. | ./. |
| 143 | 392712 | T | C | 0/0 | 0/0 | ./. | ./. |
| 144 | 401096 | G | T | 0/0 | 0/0 | ./. | ./. |
| 145 | 401445 | G | C | 0/0 | 0/0 | ./. | ./. |
| 146 | 404189 | A | C | 0/0 | 0/0 | ./. | ./. |
| 147 | 406610 | T | G | 0/0 | 0/0 | ./. | ./. |
| 148 | 407131 | C | T | 0/0 | 0/0 | ./. | ./. |
| 149 | 411268 | A | C | 0/0 | 0/0 | ./. | ./. |
| 150 | 412538 | T | A | 0/0 | 0/0 | ./. | ./. |
| 151 | 412550 | G | T | 0/0 | 0/0 | ./. | ./. |
| 152 | 413003 | A | C | 0/0 | 0/0 | ./. | ./. |
| 153 | 413373 | A | T | 0/0 | 0/0 | ./. | ./. |
| 154 | 413437 | C | T | 0/0 | 0/0 | ./. | ./. |
| 155 | 415425 | A | G | 0/0 | 0/0 | ./. | ./. |
| 156 | 415449 | A | C | 0/0 | 0/0 | ./. | ./. |
| 157 | 415458 | T | G | 0/0 | 0/0 | ./. | ./. |
| 158 | 417103 | A | C | 0/0 | 0/0 | ./. | ./. |
| 159 | 418099 | G | A | 0/0 | 0/0 | ./. | ./. |
| 160 | 418558 | A | G | 0/0 | 0/0 | ./. | ./. |
| 161 | 423778 | T | C | 0/0 | 0/0 | ./. | ./. |
| 162 | 430030 | G | T | 0/0 | 0/0 | ./. | ./. |
| 163 | 437935 | T | C | 0/0 | 0/0 | ./. | ./. |
| 164 | 440647 | G | A | 0/0 | 0/0 | ./. | ./. |
| 165 | 440664 | C | T | 0/0 | 0/0 | ./. | ./. |
| 166 | 442849 | T | A | 0/0 | 0/0 | ./. | ./. |
| 167 | 445778 | A | G | 0/0 | 0/0 | ./. | ./. |
| 168 | 446871 | T | C | 0/0 | 0/0 | ./. | ./. |
| 169 | 447998 | A | T | 0/0 | 0/0 | ./. | ./. |
| 170 | 450145 | A | G | 0/0 | 0/0 | ./. | ./. |
| 171 | 452523 | A | G | 0/0 | 0/0 | ./. | ./. |
| 172 | 452968 | G | A | 0/0 | 0/0 | ./. | ./. |
| 173 | 452987 | T | C | 0/0 | 0/0 | ./. | ./. |
| 174 | 453033 | C | T | 0/0 | 0/0 | ./. | ./. |
| 175 | 453112 | G | A | 0/0 | 0/0 | ./. | ./. |
| 176 | 453174 | T | C | 0/0 | 0/0 | ./. | ./. |
| 177 | 453188 | G | A | 0/0 | 0/0 | ./. | ./. |
| 178 | 454399 | T | C | 0/0 | 0/0 | ./. | ./. |
| 179 | 456245 | A | C | 0/0 | 0/0 | ./. | ./. |
| 180 | 466990 | T | C | 0/0 | 0/0 | ./. | ./. |
| 181 | 473415 | C | T | 0/0 | 0/0 | ./. | ./. |
| 182 | 479185 | G | A | 0/0 | 0/0 | ./. | ./. |
| 183 | 481321 | T | C | 0/0 | 0/0 | ./. | ./. |
| 184 | 481329 | T | C | 0/0 | 0/0 | ./. | ./. |
| 185 | 481922 | T | C | 0/0 | 0/0 | ./. | ./. |
| 186 | 485778 | G | A | 0/0 | 0/0 | ./. | ./. |
| 187 | 486466 | A | G | 0/0 | 0/0 | ./. | ./. |
| 188 | 487632 | G | A | 0/0 | 0/0 | ./. | ./. |
| 189 | 495057 | TA | T | 0/0 | 0/0 | ./. | ./. |
| 190 | 496107 | G | A | 0/0 | 0/0 | ./. | ./. |
| 191 | 496129 | G | T | 0/0 | 0/0 | ./. | ./. |
| 192 | 498389 | C | T | 0/0 | 0/0 | ./. | ./. |
| 193 | 502623 | G | T | 0/0 | 0/0 | ./. | ./. |
| 194 | 515727 | T | C | 0/0 | 0/0 | ./. | ./. |
| 195 | 517529 | C | T | 0/0 | 0/0 | ./. | ./. |
| 196 | 521866 | T | C | 0/0 | 0/0 | ./. | ./. |
| 197 | 525885 | AAAAAAAAAAAAAAAA | A | 0/0 | 0/0 | ./. | ./. |
| | | AAAAAAAAAAAAAAAA | | | | | |
| | | AAAAAAAAAAAAAAAA | | | | | |
| | | AAAAAAAAAAAAAAAA | | | | | |
| | | AAAACTTT | | | | | |
| | | (SEQ ID NO: 71) | | | | | |
| 198 | 528989 | A | G | 0/0 | 0/0 | ./. | ./. |
| 199 | 542757 | A | G | 0/0 | 0/0 | ./. | ./. |
| 200 | 542859 | C | A | 0/0 | 0/0 | ./. | ./. |
| 201 | 543285 | T | C | 0/0 | 0/0 | ./. | ./. |
| 202 | 543440 | G | C | 0/0 | 0/0 | ./. | ./. |
| 203 | 543565 | G | A | 0/0 | 0/0 | ./. | ./. |
| 204 | 543749 | C | T | 0/0 | 0/0 | ./. | ./. |
| 205 | 543771 | T | C | 0/0 | 0/0 | ./. | ./. |
| 206 | 543941 | C | A | 0/0 | 0/0 | ./. | ./. |
| 207 | 543958 | G | C | 0/0 | 0/0 | ./. | ./. |

TABLE 4
Polymorphic sites in a Nic2 deletion segment,
NT1.0-Scaffold0000549. REF refers of a
reference TN90 allele. ALT refers to a
sequence polymorphism found in to the
sequence K326, Narrow Leaf Madole, or Oriental
type. “0/0“ refers to homozygous for the
reference TN90 allele while “./.“
refers to missing data (e.g., deletion).

| Nic2 | | | | | | | |
|---|---|---|---|---|---|---|---|
| Marker | | | | | | | |
| No. | POS | REF | ALT | BU21 | HI | LI | LA |
| 1 | 8514 | T | A | 0/0 | ./. | 0/0 | ./. |
| 2 | 12287 | A | C | 0/0 | ./. | 0/0 | ./. |
| 3 | 15020 | C | T | 0/0 | ./. | 0/0 | ./. |
| 4 | 20105 | C | T | 0/0 | ./. | 0/0 | ./. |
| 5 | 21133 | G | T | 0/0 | ./. | 0/0 | ./. |
| 6 | 21182 | A | C | 0/0 | ./. | 0/0 | ./. |
| 7 | 25267 | T | C | 0/0 | ./. | 0/0 | ./. |
| 8 | 27211 | A | G | 0/0 | ./. | 0/0 | ./. |
| 9 | 27965 | T | A | 0/0 | ./. | 0/0 | ./. |
| 10 | 28780 | A | G | 0/0 | ./. | 0/0 | ./. |
| 11 | 28800 | G | A | 0/0 | ./. | 0/0 | ./. |
| 12 | 28976 | T | A | 0/0 | ./. | 0/0 | ./. |
| 13 | 29013 | G | A | 0/0 | ./. | 0/0 | ./. |
| 14 | 31000 | C | T | 0/0 | ./. | 0/0 | ./. |
| 15 | 31074 | T | C | 0/0 | ./. | 0/0 | ./. |
| 16 | 31118 | A | G | 0/0 | ./. | 0/0 | ./. |
| 17 | 31136 | G | A | 0/0 | ./. | 0/0 | ./. |
| 18 | 31930 | T | G | 0/0 | ./. | 0/0 | ./. |
| 19 | 32523 | A | G | 0/0 | ./. | 0/0 | ./. |
| 20 | 33617 | A | C | 0/0 | ./. | 0/0 | ./. |
| 21 | 33661 | A | T | 0/0 | ./. | 0/0 | ./. |
| 22 | 35656 | T | C | 0/0 | ./. | 0/0 | ./. |
| 23 | 35674 | C | T | 0/0 | ./. | 0/0 | ./. |
| 24 | 44008 | C | T | 0/0 | ./. | 0/0 | ./. |
| 25 | 62895 | T | C | 0/0 | ./. | 0/0 | ./. |
| 26 | 62916 | G | A | 0/0 | ./. | 0/0 | ./. |
| 27 | 64381 | A | G | 0/0 | ./. | 0/0 | ./. |
| 28 | 77284 | A | T | 0/0 | ./. | 0/0 | ./. |
| 29 | 77363 | A | G | 0/0 | ./. | 0/0 | ./. |
| 30 | 77909 | G | C | 0/0 | ./. | 0/0 | ./. |
| 31 | 77975 | A | T | 0/0 | ./. | 0/0 | ./. |
| 32 | 77985 | A | G | 0/0 | ./. | 0/0 | ./. |
| 33 | 80196 | C | T | 0/0 | ./. | 0/0 | ./. |
| 34 | 87731 | C | T | 0/0 | ./. | 0/0 | ./. |
| 35 | 87799 | G | A | 0/0 | ./. | 0/0 | ./. |
| 36 | 89358 | G | T | 0/0 | ./. | 0/0 | ./. |
| 37 | 92022 | T | C | 0/0 | ./. | 0/0 | ./. |
| 38 | 92542 | C | A | 0/0 | ./. | 0/0 | ./. |
| 39 | 92675 | C | T | 0/0 | ./. | 0/0 | ./. |
| 40 | 92695 | G | A | 0/0 | ./. | 0/0 | ./. |
| 41 | 94612 | C | G | 0/0 | ./. | 0/0 | ./. |
| 42 | 94683 | C | T | 0/0 | ./. | 0/0 | ./. |
| 43 | 103131 | G | T | 0/0 | ./. | 0/0 | ./. |
| 44 | 108577 | A | G | 0/0 | ./. | 0/0 | ./. |
| 45 | 108967 | G | A | 0/0 | ./. | 0/0 | ./. |
| 46 | 113914 | T | C | 0/0 | ./. | 0/0 | ./. |
| 47 | 118142 | A | T | 0/0 | ./. | 0/0 | ./. |
| 48 | 118151 | T | C | 0/0 | ./. | 0/0 | ./. |
| 49 | 119780 | A | T | 0/0 | ./. | 0/0 | ./. |
| 50 | 121195 | G | A | 0/0 | ./. | 0/0 | ./. |
| 51 | 135236 | G | T | 0/0 | ./. | 0/0 | ./. |
| 52 | 135239 | C | T | 0/0 | ./. | 0/0 | ./. |
| 53 | 135401 | T | C | 0/0 | ./. | 0/0 | ./. |
| 54 | 135683 | T | A | 0/0 | ./. | 0/0 | ./. |
| 55 | 136546 | C | T | 0/0 | ./. | 0/0 | ./. |
| 56 | 136553 | T | G | 0/0 | ./. | 0/0 | ./. |
| 57 | 137241 | G | A | 0/0 | ./. | 0/0 | ./. |
| 58 | 137643 | CT | C | 0/0 | ./. | 0/0 | ./. |
| 59 | 138384 | C | G | 0/0 | ./. | 0/0 | ./. |
| 60 | 138450 | T | C | 0/0 | ./. | 0/0 | ./. |
| 61 | 138457 | G | A | 0/0 | ./. | 0/0 | ./. |
| 62 | 138663 | T | C | 0/0 | ./. | 0/0 | ./. |
| 63 | 138791 | G | A | 0/0 | ./. | 0/0 | ./. |
| 64 | 152981 | C | T | 0/0 | ./. | 0/0 | ./. |
| 65 | 152994 | G | A | 0/0 | ./. | 0/0 | ./. |
| 66 | 158500 | C | T | 0/0 | ./. | 0/0 | ./. |
| 67 | 159059 | G | A | 0/0 | ./. | 0/0 | ./. |
| 68 | 159855 | A | C | 0/0 | ./. | 0/0 | ./. |
| 69 | 162242 | C | A | 0/0 | ./. | 0/0 | ./. |
| 70 | 162272 | T | C | 0/0 | ./. | 0/0 | ./. |
| 71 | 162616 | T | C | 0/0 | ./. | 0/0 | ./. |
| 72 | 162698 | A | T | 0/0 | ./. | 0/0 | ./. |
| 73 | 163071 | T | C | 0/0 | ./. | 0/0 | ./. |
| 74 | 163389 | T | A | 0/0 | ./. | 0/0 | ./. |
| 75 | 163549 | C | T | 0/0 | ./. | 0/0 | ./. |
| 76 | 169105 | A | C | 0/0 | ./. | 0/0 | ./. |
| 77 | 169578 | A | G | 0/0 | ./. | 0/0 | ./. |
| 78 | 170180 | G | A | 0/0 | ./. | 0/0 | ./. |
| 79 | 170221 | G | T | 0/0 | ./. | 0/0 | ./. |
| 80 | 170292 | A | G | 0/0 | ./. | 0/0 | ./. |
| 81 | 176741 | TG | T | 0/0 | ./. | 0/0 | ./. |
| 82 | 177610 | G | A | 0/0 | ./. | 0/0 | ./. |
| 83 | 189973 | C | A | 0/0 | ./. | 0/0 | ./. |
| 84 | 190622 | T | C | 0/0 | ./. | 0/0 | ./. |
| 85 | 192179 | T | C | 0/0 | ./. | 0/0 | ./. |
| 86 | 192203 | A | G | 0/0 | ./. | 0/0 | ./. |
| 87 | 192520 | G | A | 0/0 | ./. | 0/0 | ./. |
| 88 | 198596 | A | T | 0/0 | ./. | 0/0 | ./. |
| 89 | 210148 | C | T | 0/0 | ./. | 0/0 | ./. |
| 90 | 211238 | A | G | 0/0 | ./. | 0/0 | ./. |
| 91 | 211276 | G | A | 0/0 | ./. | 0/0 | ./. |
| 92 | 211298 | C | T | 0/0 | ./. | 0/0 | ./. |
| 93 | 213281 | C | G | 0/0 | ./. | 0/0 | ./. |
| 94 | 221865 | T | G | 0/0 | ./. | 0/0 | ./. |
| 95 | 224164 | T | A | 0/0 | ./. | 0/0 | ./. |
| 96 | 226470 | A | G | 0/0 | ./. | 0/0 | ./. |
| 97 | 228965 | C | A | 0/0 | ./. | 0/0 | ./. |
| 98 | 230571 | G | A | 0/0 | ./. | 0/0 | ./. |
| 99 | 232100 | C | G | 0/0 | ./. | 0/0 | ./. |
| 100 | 232459 | G | A | 0/0 | ./. | 0/0 | ./. |
| 101 | 234537 | C | T | 0/0 | ./. | 0/0 | ./. |
| 102 | 241822 | G | A | 0/0 | ./. | 0/0 | ./. |
| 103 | 244741 | C | T | 0/0 | ./. | 0/0 | ./. |
| 104 | 246403 | G | A | 0/0 | ./. | 0/0 | ./. |
| 105 | 246519 | C | T | 0/0 | ./. | 0/0 | ./. |
| 106 | 247174 | G | A | 0/0 | ./. | 0/0 | ./. |
| 107 | 252132 | G | A | 0/0 | ./. | 0/0 | ./. |
| 108 | 252717 | T | C | 0/0 | ./. | 0/0 | ./. |
| 109 | 252728 | T | C | 0/0 | ./. | 0/0 | ./. |
| 110 | 255099 | A | G | 0/0 | ./. | 0/0 | ./. |
| 111 | 257486 | C | T | 0/0 | ./. | 0/0 | ./. |
| 112 | 258008 | C | A | 0/0 | ./. | 0/0 | ./. |
| 113 | 258101 | G | A | 0/0 | ./. | 0/0 | ./. |
| 114 | 260634 | C | T | 0/0 | ./. | 0/0 | ./. |
| 115 | 260944 | C | T | 0/0 | ./. | 0/0 | ./. |
| 116 | 261816 | T | C | 0/0 | ./. | 0/0 | ./. |
| 117 | 264558 | T | C | 0/0 | ./. | 0/0 | ./. |
| 118 | 265660 | G | A | 0/0 | ./. | 0/0 | ./. |
| 119 | 275884 | A | G | 0/0 | ./. | 0/0 | ./. |
| 120 | 277012 | A | G | 0/0 | ./. | 0/0 | ./. |
| 121 | 278708 | A | G | 0/0 | ./. | 0/0 | ./. |
| 122 | 278762 | T | C | 0/0 | ./. | 0/0 | ./. |
| 123 | 278781 | G | T | 0/0 | ./. | 0/0 | ./. |
| 124 | 281156 | A | C | 0/0 | ./. | 0/0 | ./. |
| 125 | 282192 | G | T | 0/0 | ./. | 0/0 | ./. |
| 126 | 285956 | A | G | 0/0 | ./. | 0/0 | ./. |
| 127 | 286075 | A | G | 0/0 | ./. | 0/0 | ./. |
| 128 | 290957 | G | T | 0/0 | ./. | 0/0 | ./. |
| 129 | 295851 | C | A | 0/0 | ./. | 0/0 | ./. |
| 130 | 297396 | G | C | 0/0 | ./. | 0/0 | ./. |
| 131 | 298942 | G | T | 0/0 | ./. | 0/0 | ./. |
| 132 | 299095 | A | G | 0/0 | ./. | 0/0 | ./. |
| 133 | 300592 | C | T | 0/0 | ./. | 0/0 | ./. |
| 134 | 301121 | C | G | 0/0 | ./. | 0/0 | ./. |
| 135 | 301147 | C | T | 0/0 | ./. | 0/0 | ./. |
| 136 | 306986 | G | A | 0/0 | ./. | 0/0 | ./. |
| 137 | 310002 | C | T | 0/0 | ./. | 0/0 | ./. |
| 138 | 314892 | C | T | 0/0 | ./. | 0/0 | ./. |
| 139 | 324211 | G | A | 0/0 | ./. | 0/0 | ./. |
| 140 | 327796 | T | G | 0/0 | ./. | 0/0 | ./. |
| 141 | 330726 | A | G | 0/0 | ./. | 0/0 | ./. |
| 142 | 331046 | G | A | 0/0 | ./. | 0/0 | ./. |
| 143 | 332636 | T | C | 0/0 | ./. | 0/0 | ./. |
| 144 | 336046 | G | C | 0/0 | ./. | 0/0 | ./. |
| 145 | 338147 | C | A | 0/0 | ./. | 0/0 | ./. |
| 146 | 340868 | C | T | 0/0 | ./. | 0/0 | ./. |
| 147 | 341170 | T | A | 0/0 | ./. | 0/0 | ./. |
| 148 | 359439 | T | A | 0/0 | ./. | 0/0 | ./. |
| 149 | 359447 | C | A | 0/0 | ./. | 0/0 | ./. |
| 150 | 362131 | A | G | 0/0 | ./. | 0/0 | ./. |
| 151 | 363467 | G | A | 0/0 | ./. | 0/0 | ./. |
| 152 | 365467 | T | A | 0/0 | ./. | 0/0 | ./. |
| 153 | 367311 | A | G | 0/0 | ./. | 0/0 | ./. |
| 154 | 370267 | G | A | 0/0 | ./. | 0/0 | ./. |
| 155 | 384941 | A | G | 0/0 | ./. | 0/0 | ./. |
| 156 | 393244 | G | T | 0/0 | ./. | 0/0 | ./. |
| 157 | 394169 | T | C | 0/0 | ./. | 0/0 | ./. |
| 158 | 394200 | A | G | 0/0 | ./. | 0/0 | ./. |
| 159 | 394213 | A | C | 0/0 | ./. | 0/0 | ./. |
| 160 | 394228 | G | A | 0/0 | ./. | 0/0 | ./. |
| 161 | 396927 | C | T | 0/0 | ./. | 0/0 | ./. |
| 162 | 404142 | T | C | 0/0 | ./. | 0/0 | ./. |
| 163 | 404761 | A | G | 0/0 | ./. | 0/0 | ./. |
| 164 | 406475 | G | A | 0/0 | ./. | 0/0 | ./. |
| 165 | 406481 | T | A | 0/0 | ./. | 0/0 | ./. |
| 166 | 410940 | G | A | 0/0 | ./. | 0/0 | ./. |
| 167 | 411032 | G | A | 0/0 | ./. | 0/0 | ./. |
| 168 | 411069 | T | A | 0/0 | ./. | 0/0 | ./. |
| 169 | 411317 | GA | G | 0/0 | ./. | 0/0 | ./. |
| 170 | 413027 | C | A | 0/0 | ./. | 0/0 | ./. |
| 171 | 413058 | C | T | 0/0 | ./. | 0/0 | ./. |
| 172 | 414268 | C | G | 0/0 | ./. | 0/0 | ./. |
| 173 | 416798 | T | C | 0/0 | ./. | 0/0 | ./. |
| 174 | 417540 | G | C | 0/0 | ./. | 0/0 | ./. |
| 175 | 420742 | A | G | 0/0 | ./. | 0/0 | ./. |
| 176 | 421259 | T | C | 0/0 | ./. | 0/0 | ./. |
| 177 | 426709 | A | G | 0/0 | ./. | 0/0 | ./. |
| 178 | 427690 | G | C | 0/0 | ./. | 0/0 | ./. |
| 179 | 430705 | G | A | 0/0 | ./. | 0/0 | ./. |
| 180 | 431773 | G | A | 0/0 | ./. | 0/0 | ./. |
| 181 | 433900 | A | G | 0/0 | ./. | 0/0 | ./. |
| 182 | 442372 | T | C | 0/0 | ./. | 0/0 | ./. |
| 183 | 451131 | G | A | 0/0 | ./. | 0/0 | ./. |
| 184 | 454572 | C | A | 0/0 | ./. | 0/0 | ./. |
| 185 | 460976 | G | A | 0/0 | ./. | 0/0 | ./. |
| 186 | 461460 | C | T | 0/0 | ./. | 0/0 | ./. |
| 187 | 464177 | A | G | 0/0 | ./. | 0/0 | ./. |
| 188 | 465089 | T | C | 0/0 | ./. | 0/0 | ./. |
| 189 | 465495 | T | G | 0/0 | ./. | 0/0 | ./. |
| 190 | 468266 | C | A | 0/0 | ./. | 0/0 | ./. |
| 191 | 474980 | C | T | 0/0 | ./. | 0/0 | ./. |
| 192 | 480131 | A | T | 0/0 | ./. | 0/0 | ./. |
| 193 | 483164 | T | C | 0/0 | ./. | 0/0 | ./. |
| 194 | 484777 | A | G | 0/0 | ./. | 0/0 | ./. |
| 195 | 485948 | G | A | 0/0 | ./. | 0/0 | ./. |
| 196 | 486626 | G | C | 0/0 | ./. | 0/0 | ./. |
| 197 | 494004 | C | T | 0/0 | ./. | 0/0 | ./. |
| 198 | 494393 | T | C | 0/0 | ./. | 0/0 | ./. |
| 199 | 495953 | C | T | 0/0 | ./. | 0/0 | ./. |
| 200 | 496552 | A | G | 0/0 | ./. | 0/0 | ./. |
| 201 | 499298 | A | G | 0/0 | ./. | 0/0 | ./. |
| 202 | 499947 | T | C | 0/0 | ./. | 0/0 | ./. |
| 203 | 501352 | G | A | 0/0 | ./. | 0/0 | ./. |
| 204 | 505470 | A | G | 0/0 | ./. | 0/0 | ./. |
| 205 | 509926 | G | A | 0/0 | ./. | 0/0 | ./. |
| 206 | 511336 | A | G | 0/0 | ./. | 0/0 | ./. |
| 207 | 513808 | TC | T | 0/0 | ./. | 0/0 | ./. |
| 208 | 515055 | C | T | 0/0 | ./. | 0/0 | ./. |
| 209 | 516444 | A | G | 0/0 | ./. | 0/0 | ./. |
| 210 | 519420 | A | T | 0/0 | ./. | 0/0 | ./. |
| 211 | 521028 | G | C | 0/0 | ./. | 0/0 | ./. |
| 212 | 521834 | T | C | 0/0 | ./. | 0/0 | ./. |
| 213 | 524240 | A | C | 0/0 | ./. | 0/0 | ./. |
| 214 | 524256 | T | C | 0/0 | ./. | 0/0 | ./. |
| 215 | 524317 | A | G | 0/0 | ./. | 0/0 | ./. |
| 216 | 524986 | G | A | 0/0 | ./. | 0/0 | ./. |
| 217 | 526266 | A | C | 0/0 | ./. | 0/0 | ./. |
| 218 | 526905 | C | T | 0/0 | ./. | 0/0 | ./. |
| 219 | 526987 | C | A | 0/0 | ./. | 0/0 | ./. |
| 220 | 530341 | A | G | 0/0 | ./. | 0/0 | ./. |
| 221 | 531695 | A | T | 0/0 | ./. | 0/0 | ./. |
| 222 | 541587 | T | C | 0/0 | ./. | 0/0 | ./. |
| 223 | 541648 | G | A | 0/0 | ./. | 0/0 | ./. |
| 224 | 544386 | A | G | 0/0 | ./. | 0/0 | ./. |
| 225 | 545716 | T | C | 0/0 | ./. | 0/0 | ./. |
| 226 | 546047 | C | A | 0/0 | ./. | 0/0 | ./. |
| 227 | 546372 | A | G | 0/0 | ./. | 0/0 | ./. |
| 228 | 546416 | A | G | 0/0 | ./. | 0/0 | ./. |
| 229 | 546434 | T | A | 0/0 | ./. | 0/0 | ./. |
| 230 | 546775 | C | T | 0/0 | ./. | 0/0 | ./. |
| 231 | 547015 | A | G | 0/0 | ./. | 0/0 | ./. |
| 232 | 554248 | A | G | 0/0 | ./. | 0/0 | ./. |
| 233 | 554496 | C | T | 0/0 | ./. | 0/0 | ./. |
| 234 | 556239 | A | G | 0/0 | ./. | 0/0 | ./. |
| 235 | 558480 | C | T | 0/0 | ./. | 0/0 | ./. |
| 236 | 562524 | C | T | 0/0 | ./. | 0/0 | ./. |
| 237 | 563642 | A | T | 0/0 | ./. | 0/0 | ./. |
| 238 | 563802 | T | A | 0/0 | ./. | 0/0 | ./. |
| 239 | 563862 | G | T | 0/0 | ./. | 0/0 | ./. |
| 240 | 573521 | C | T | 0/0 | ./. | 0/0 | ./. |
| 241 | 573552 | T | C | 0/0 | ./. | 0/0 | ./. |
| 242 | 574370 | C | A | 0/0 | ./. | 0/0 | ./. |
| 243 | 576866 | C | T | 0/0 | ./. | 0/0 | ./. |
| 244 | 577137 | C | T | 0/0 | ./. | 0/0 | ./. |
| 245 | 582336 | T | A | 0/0 | ./. | 0/0 | ./. |
| 246 | 585822 | G | A | 0/0 | ./. | 0/0 | ./. |
| 247 | 586808 | A | G | 0/0 | ./. | 0/0 | ./. |
| 248 | 592379 | A | C | 0/0 | ./. | 0/0 | ./. |
| 249 | 594088 | T | C | 0/0 | ./. | 0/0 | ./. |
| 250 | 594122 | T | A | 0/0 | ./. | 0/0 | ./. |
| 251 | 594128 | C | A | 0/0 | ./. | 0/0 | ./. |
| 252 | 596697 | T | C | 0/0 | ./. | 0/0 | ./. |
| 253 | 599034 | G | C | 0/0 | ./. | 0/0 | ./. |
| 254 | 609636 | T | C | 0/0 | ./. | 0/0 | ./. |
| 255 | 610500 | C | T | 0/0 | ./. | 0/0 | ./. |
| 256 | 610533 | T | A | 0/0 | ./. | 0/0 | ./. |
| 257 | 610938 | A | G | 0/0 | ./. | 0/0 | ./. |
| 258 | 614216 | A | G | 0/0 | ./. | 0/0 | ./. |
| 259 | 614885 | TTA | T | 0/0 | ./. | 0/0 | ./. |
| 260 | 617065 | G | A | 0/0 | ./. | 0/0 | ./. |
| 261 | 621974 | G | A | 0/0 | ./. | 0/0 | ./. |
| 262 | 623585 | T | G | 0/0 | ./. | 0/0 | ./. |
| 263 | 645256 | C | G | 0/0 | ./. | 0/0 | ./. |
| 264 | 645263 | T | C | 0/0 | ./. | 0/0 | ./. |
| 265 | 646476 | C | T | 0/0 | ./. | 0/0 | ./. |
| 266 | 652446 | AT | A | 0/0 | ./. | 0/0 | ./. |
| 267 | 660505 | C | T | 0/0 | ./. | 0/0 | ./. |
| 268 | 667339 | G | A | 0/0 | ./. | 0/0 | ./. |
| 269 | 668081 | A | G | 0/0 | ./. | 0/0 | ./. |
| 270 | 669231 | T | G | 0/0 | ./. | 0/0 | ./. |
| 271 | 680482 | G | A | 0/0 | ./. | 0/0 | ./. |
| 272 | 680899 | T | C | 0/0 | ./. | 0/0 | ./. |
| 273 | 681503 | A | G | 0/0 | ./. | 0/0 | ./. |
| 274 | 681579 | TA | T | 0/0 | ./. | 0/0 | ./. |
| 275 | 685669 | G | A | 0/0 | ./. | 0/0 | ./. |
| 276 | 687781 | T | C | 0/0 | ./. | 0/0 | ./. |
| 277 | 690142 | C | T | 0/0 | ./. | 0/0 | ./. |
| 278 | 696619 | G | A | 0/0 | ./. | 0/0 | ./. |
| 279 | 696973 | C | T | 0/0 | ./. | 0/0 | ./. |
| 280 | 699014 | T | C | 0/0 | ./. | 0/0 | ./. |
| 281 | 699059 | A | G | 0/0 | ./. | 0/0 | ./. |
| 282 | 699441 | A | G | 0/0 | ./. | 0/0 | ./. |
| 283 | 699482 | A | G | 0/0 | ./. | 0/0 | ./. |
| 284 | 699507 | A | C | 0/0 | ./. | 0/0 | ./. |
| 285 | 699568 | AC | A | 0/0 | ./. | 0/0 | ./. |
| 286 | 699991 | C | T | 0/0 | ./. | 0/0 | ./. |
| 287 | 701221 | G | A | 0/0 | ./. | 0/0 | ./. |
| 288 | 701338 | C | T | 0/0 | ./. | 0/0 | ./. |
| 289 | 704968 | A | G | 0/0 | ./. | 0/0 | ./. |
| 290 | 705347 | C | T | 0/0 | ./. | 0/0 | ./. |
| 291 | 708907 | T | C | 0/0 | ./. | 0/0 | ./. |
| 292 | 710281 | C | T | 0/0 | ./. | 0/0 | ./. |
| 293 | 711996 | T | C | 0/0 | ./. | 0/0 | ./. |
| 294 | 714019 | C | A | 0/0 | ./. | 0/0 | ./. |
| 295 | 714445 | T | C | 0/0 | ./. | 0/0 | ./. |
| 296 | 714483 | T | C | 0/0 | ./. | 0/0 | ./. |
| 297 | 714491 | T | C | 0/0 | ./. | 0/0 | ./. |
| 298 | 716492 | A | G | 0/0 | ./. | 0/0 | ./. |
| 299 | 716551 | A | G | 0/0 | ./. | 0/0 | ./. |
| 300 | 721681 | G | A | 0/0 | ./. | 0/0 | ./. |
| 301 | 722271 | T | A | 0/0 | ./. | 0/0 | ./. |
| 302 | 723002 | G | C | 0/0 | ./. | 0/0 | ./. |
| 303 | 732955 | T | C | 0/0 | ./. | 0/0 | ./. |
| 304 | 734117 | T | G | 0/0 | ./. | 0/0 | ./. |
| 305 | 743601 | TA | T | 0/0 | ./. | 0/0 | ./. |
| 306 | 745383 | C | T | 0/0 | ./. | 0/0 | ./. |
| 307 | 745938 | C | T | 0/0 | ./. | 0/0 | ./. |
| 308 | 747238 | T | C | 0/0 | ./. | 0/0 | ./. |
| 309 | 750673 | A | G | 0/0 | ./. | 0/0 | ./. |
| 310 | 751683 | G | T | 0/0 | ./. | 0/0 | ./. |
| 311 | 751702 | C | T | 0/0 | ./. | 0/0 | ./. |
| 312 | 762212 | A | G | 0/0 | ./. | 0/0 | ./. |
| 313 | 762934 | C | T | 0/0 | ./. | 0/0 | ./. |
| 314 | 765864 | C | T | 0/0 | ./. | 0/0 | ./. |
| 315 | 768978 | G | A | 0/0 | ./. | 0/0 | ./. |
| 316 | 770377 | T | A | 0/0 | ./. | 0/0 | ./. |
| 317 | 773111 | G | A | 0/0 | ./. | 0/0 | ./. |
| 318 | 773112 | T | A | 0/0 | ./. | 0/0 | ./. |
| 319 | 773155 | A | T | 0/0 | ./. | 0/0 | ./. |
| 320 | 778101 | C | A | 0/0 | ./. | 0/0 | ./. |
| 321 | 778231 | T | A | 0/0 | ./. | 0/0 | ./. |
| 322 | 779756 | C | T | 0/0 | ./. | 0/0 | ./. |
| 323 | 780381 | A | G | 0/0 | ./. | 0/0 | ./. |
| 324 | 780398 | A | C | 0/0 | ./. | 0/0 | ./. |
| 325 | 782275 | A | C | 0/0 | ./. | 0/0 | ./. |
| 326 | 782502 | T | G | 0/0 | ./. | 0/0 | ./. |
| 327 | 788379 | A | G | 0/0 | ./. | 0/0 | ./. |
| 328 | 788416 | T | A | 0/0 | ./. | 0/0 | ./. |
| 329 | 789721 | C | T | 0/0 | ./. | 0/0 | ./. |
| 330 | 795120 | G | A | 0/0 | ./. | 0/0 | ./. |
| 331 | 797627 | G | A | 0/0 | ./. | 0/0 | ./. |
| 332 | 799891 | A | C | 0/0 | ./. | 0/0 | ./. |
| 333 | 800525 | A | G | 0/0 | ./. | 0/0 | ./. |
| 334 | 801525 | T | C | 0/0 | ./. | 0/0 | ./. |
| 335 | 802686 | ATGCCATGTGGTTTAT | A | 0/0 | ./. | 0/0 | ./. |
| | | ATTATTGGCACTTGAG | | | | | |
| | | TTGTCCGTGCGAGTCC | | | | | |
| | | AGATATTTATACTATA | | | | | |
| | | GC | | | | | |
| | | (SEQ ID NO: 72) | | | | | |
| 336 | 802777 | A | T | 0/0 | ./. | 0/0 | ./. |
| 337 | 807008 | T | C | 0/0 | ./. | 0/0 | ./. |
| 338 | 808634 | T | G | 0/0 | ./. | 0/0 | ./. |
| 339 | 813994 | G | A | 0/0 | ./. | 0/0 | ./. |
| 340 | 817957 | A | G | 0/0 | ./. | 0/0 | ./. |

### Example 3

### Confirmation of the Identified Nic1 Locus by Genetic Segregation Analysis

[0340] To help confirm the identity of the region identified as Nic1 locus, an F₂ population segregating for Nic1 and Nic2 loci was developed with the aim of observing markers for nic1 and nic2 segregating with the phenotype. The F₂ population was developed from a cross between TN90 with LA BU21, and has a population size of 173. DNA was extracted from green leaf tissue of individual F₂ plants as well as the parental lines and the four known Burley lines (BU21, HI BU21, LI BU21, and LA BU21) using a customized sbeadex maxi plant kit (LGC genomics, LLC, Beverly, Mass.) on the automated DNA extraction instrument, Oktopure (LGC genomics, LLC, Beverly, Mass.). Ninety (90) out of the 173 individuals were randomly chosen from this population to be genotyped at both Nic1 and Nic2 locus along with a control locus. The identified Nic1 deletion was confirmed by PCR amplification of a selected region of the identified deletion. PCR primers were designed for the Nic1 locus using Primer3 web V. 4.0.0 and are shown in Table 5. Primer sequences for Nic2 locus, and the control locus were obtained from Shoji et al. (2010), and are also provided in Table 5.

[0341] PCR was performed in a 30 μL reaction with 5 μl of˜10 ng/μl DNA, 15 μl of 2× AmpliTaq Gold® 360 MasterMix (Applied Biosystems, Foster City, Calif.), 1.2 μl of 10 μM Forward primer, 1.2 μl of 10 μM Reverse primer, and 7.6 μl of ddH₂O. PCR reactions proceeded with an initial denaturation at 95° C. for 5 min, followed by 35 cycles, with a temperature profile of 94° C. for 20 s, 20 s at the optimal annealing temperature (Table 5), and 72° C. for 1 minute. This was followed by a 7-minute final elongation period at 72 ° C., and an indefinite hold at 4° C.

TABLE 5
Table listing primer sequences and
annealing temperature used for PCR

| Locus | Specific Gene | Primer | Primer Sequence (SEQ ID) | PCR Tm |
|---|---|---|---|---|
| Nic1 | g100614_Scaffold | F | CAACCTAGCCACTGGTCCAT | 62 |
| | 0002504 | | (SEQ ID No: 3) | |
| | | R | TCAAACCAAGAGCGAGGAT | |
| | | | (SEQ ID No: 4) | |
| Nic2 | ERF 189 | F | GGGCAATGGAAATGAATCTAGC | 55 |
| | | | (SEQ ID No: | |
| | | R | CTTCCTTCCTTTCACATAG | |
| | | | (SEQ ID No: 6) | |
| Control | ERF 199 | F | CCATTCATTTTCATCCAAACCC | 55 |
| | | | (SEQ ID No: 7) | |
| | | R | CGGAGTACTTTTCATGGGATTC | |
| | | | (SEQ ID No: 8) | |

[0342] PCR products were then visualized on eGene (Qiagen N. V.,Venlo, Netherlands), with presence of a PCR product band of desirable size scored as presence of a locus and its absence noted as deletion of the locus. The primer for gene ERF199 (Table 5) served as control, and its absence indicated issues with DNA quality and if absent the sample was removed from further analyses. Alkaloid measurements of nicotine, nornicotine, anatabine and anabasin were also made on each individual plant from leaf samples collected 2 weeks after topping (Table 6), using a GC-FID method based on CORESTA Recommended Methods (CRM N0. 7) and ISO Standards (ISO TC 126N 394 E.). Alkaloid measurements served as an additional confirmation for the nic1 and nic2 genotype.

[0343] All 90 F₂ individuals as well as TN90, BU21, HI BU21, LI BU21 and LA BU21 showed successful amplification of the control ERF 199 primers. A deletion of Nic2 locus was observed in 19 out of the 90 F₂ individuals, as well as in HI BU21 and LA BU21. A deletion of Nic1 locus was seen in 21 out of the 90 F2 individuals, as well as in LI BU21 and LA BU21. Also, both Nic1 and Nic2 loci were seen to be deleted in 5 out of the 90 F₂ plants, along with LA BU21. Table 6 provides information on the genotype calls for 90 out of the 173 F₂ individual. Table 7 provides the observed and expected number of plants for each genotype given a segregation ratio of 9:3:3:1 for the two loci. Average percent total alkaloid levels for each of the four genotypes observed in the F₂ segregating population ((LA Burley 21×TN 90 LC) (X)) are shown in Table 8.

TABLE 6
Nic1 and Nic 2 genotypes and alkaloid measurements of individual
plants of the F₂ population segregating for nic1 and nic2 ((LA
Burley 21 × TN 90 LC) (X)). The absence of Nic1 and Ni2 genotype
information indicate that those plants were not genotyped. BLQ:
below level of quantification.

| | Nic1 Genotype | Nic2 Genotype | | |
|---|---|---|---|---|
| | (Present = 1, | (Present = 1, | Percent Total | Percent |
| Plant | Absent = 0) | Absent = 0) | Alkaloid | Nicotine |
| Plant 1 | 1 | 0 | 3.0011 | 2.8628 |
| Plant 2 | 1 | 1 | 2.6729 | 2.5628 |
| Plant 3 | 0 | 1 | 2.2933 | 2.2051 |
| Plant 4 | 0 | 0 | BLQ | BLQ |
| Plant 5 | 1 | 1 | 3.1597 | 3.0139 |
| Plant 6 | 1 | 1 | 2.9731 | 2.8266 |
| Plant 7 | 0 | 0 | BLQ | BLQ |
| Plant 8 | 1 | 1 | 2.8809 | 2.763 |
| Plant 9 | 1 | 1 | 4.1221 | 3.9034 |
| Plant 10 | 1 | 1 | 3.994 | 3.8198 |
| Plant 11 | 1 | 1 | 3.7119 | 3.5467 |
| Plant 12 | 1 | 1 | 3.6687 | 3.5089 |
| Plant 13 | 1 | 1 | 4.2203 | 4.0304 |
| Plant 14 | 1 | 0 | 3.2027 | 3.0498 |
| Plant 15 | 1 | 1 | 3.7481 | 3.5971 |
| Plant 16 | 0 | 1 | BLQ | BLQ |
| Plant 17 | 1 | 1 | 4.422 | 4.1744 |
| Plant 18 | 1 | 1 | 2.8292 | 2.7127 |
| Plant 19 | 1 | 0 | 2.7538 | 2.6094 |
| Plant 20 | | | 1.9167 | 1.8179 |
| Plant 21 | 1 | 1 | 4.3081 | 4.0381 |
| Plant 22 | 1 | 1 | 3.6128 | 3.4443 |
| Plant 23 | 1 | 1 | BLQ | BLQ |
| Plant 24 | 1 | 1 | BLQ | BLQ |
| Plant 25 | 0 | 1 | 1.9377 | 1.8346 |
| Plant 26 | 1 | 1 | 2.8042 | 2.6369 |
| Plant 27 | 1 | 1 | 3.2544 | 3.1033 |
| Plant 28 | 1 | 1 | 3.4886 | 3.3306 |
| Plant 29 | 1 | 1 | 2.7115 | 2.5954 |
| Plant 30 | 1 | 1 | BLQ | BLQ |
| Plant 31 | 1 | 1 | 4.1091 | 3.9219 |
| Plant 32 | 1 | 1 | 3.2426 | 3.1062 |
| Plant 33 | 0 | 1 | 1.9005 | 1.7845 |
| Plant 34 | | | BLQ | BLQ |
| Plant 35 | 0 | 1 | 3.0363 | 2.8753 |
| Plant 36 | 1 | 1 | 3.6491 | 3.4489 |
| Plant 37 | 0 | 1 | 1.7179 | 1.6199 |
| Plant 38 | 1 | 0 | 2.8954 | 2.7684 |
| Plant 39 | 1 | 1 | 3.5936 | 3.4294 |
| Plant 40 | 0 | 1 | 2.8582 | 2.7421 |
| Plant 41 | 1 | 0 | BLQ | BLQ |
| Plant 42 | | | 4.4196 | 4.2055 |
| Plant 43 | | | BLQ | BLQ |
| Plant 44 | 0 | 1 | 1.6122 | 1.5324 |
| Plant 45 | 1 | 1 | 2.4573 | 2.3326 |
| Plant 46 | 1 | 1 | 3.4145 | 3.1655 |
| Plant 47 | 1 | 1 | 3.5314 | 3.3588 |
| Plant 48 | 1 | 1 | 3.7216 | 3.5305 |
| Plant 49 | 1 | 0 | 3.9067 | 3.7233 |
| Plant 50 | 1 | 0 | 3.0601 | 2.9073 |
| Plant 51 | 1 | 1 | 3.8504 | 3.6463 |
| Plant 52 | 0 | 1 | BLQ | BLQ |
| Plant 53 | 1 | 1 | 4.759 | 4.47 |
| Plant 54 | | | 3.6204 | 3.4389 |
| Plant 55 | 0 | 0 | 0.5823 | 0.5489 |
| Plant 56 | 1 | 1 | 3.5092 | 3.3467 |
| Plant 57 | | | 4.107 | 3.9257 |
| Plant 58 | 0 | 1 | 2.4405 | 2.3477 |
| Plant 59 | 0 | 0 | 0.4188 | 0.3927 |
| Plant 60 | 1 | 1 | 3.8854 | 3.7403 |
| Plant 61 | 1 | 1 | 5.0457 | 4.8093 |
| Plant 62 | 0 | 1 | 2.1401 | 2.0358 |
| Plant 63 | 1 | 1 | 3.5212 | 3.3729 |
| Plant 64 | 1 | 1 | 5.1868 | 4.9157 |
| Plant 65 | | | 2.1012 | 1.9855 |
| Plant 66 | 1 | 0 | 0.3436 | 0.3282 |
| Plant 67 | | | 2.3158 | 2.2265 |
| Plant 68 | 1 | 1 | 4.5611 | 4.3195 |
| Plant 69 | 1 | 0 | 3.5517 | 3.4176 |
| Plant 70 | 1 | 1 | 3.945 | 3.7651 |
| Plant 71 | 0 | 1 | 3.8097 | 3.6456 |
| Plant 72 | 1 | 0 | 4.1787 | 3.9818 |
| Plant 73 | 1 | 0 | 5.8965 | 5.5549 |
| Plant 74 | | | 3.5723 | 3.393 |
| Plant 75 | 1 | 1 | 5.6703 | 5.3808 |
| Plant 76 | 1 | 1 | 3.1131 | 2.9747 |
| Plant 77 | 1 | 1 | 4.2168 | 4.0215 |
| Plant 78 | 0 | 1 | 2.9419 | 2.79 |
| Plant 79 | 1 | 1 | 4.2109 | 3.9834 |
| Plant 80 | | | 4.3812 | 4.1685 |
| Plant 81 | 1 | 0 | 0.7258 | 0.6868 |
| Plant 82 | 1 | 0 | 4.0284 | 3.8092 |
| Plant 83 | 0 | 1 | 2.076 | 1.9724 |
| Plant 84 | 1 | 1 | 5.1348 | 4.8334 |
| Plant 85 | 1 | 1 | 5.6781 | 5.3311 |
| Plant 86 | 1 | 1 | 4.3462 | 4.1069 |
| Plant 87 | 1 | 1 | 4.0997 | 3.8974 |
| Plant 88 | 1 | 1 | 3.47 | 3.3158 |
| Plant 89 | 0 | 1 | 2.7871 | 2.6465 |
| Plant 90 | | | 3.5846 | 3.4166 |
| Plant 91 | | | 2.3103 | 2.187 |
| Plant 92 | | | 2.8975 | 2.7746 |
| Plant 93 | | | 3.5385 | 3.3521 |
| Plant 94 | | | 5.2231 | 4.9531 |
| Plant 95 | | | 0.5855 | 0.5538 |
| Plant 96 | | | 2.6133 | 2.4813 |
| Plant 97 | | | 4.3772 | 4.1254 |
| Plant 98 | | | 5.453 | 5.0786 |
| Plant 99 | | | 3.5055 | 3.2963 |
| Plant 100 | | | 2.0902 | 1.9902 |
| Plant 101 | | | 4.5207 | 4.2845 |
| Plant 102 | | | 2.0429 | 1.943 |
| Plant 103 | | | BLQ | BLQ |
| Plant 104 | | | 3.448 | 3.3 |
| Plant 105 | | | 4.3806 | 4.1605 |
| Plant 106 | | | 4.3696 | 4.1293 |
| Plant 107 | | | 4.0754 | 3.8637 |
| Plant 108 | | | 4.1516 | 3.8525 |
| Plant 109 | | | 3.6425 | 3.4421 |
| Plant 110 | | | 4.5431 | 4.3192 |
| Plant 111 | | | 4.4435 | 4.1513 |
| Plant 112 | | | 3.9523 | 3.737 |
| Plant 113 | | | 3.4997 | 3.3269 |
| Plant 114 | | | 3.8171 | 3.638 |
| Plant 115 | | | 3.4582 | 3.3031 |
| Plant 116 | 1 | 1 | 3.5845 | 3.4243 |
| Plant 117 | | | 3.945 | 3.7507 |
| Plant 118 | 0 | 1 | 2.5889 | 2.4632 |
| Plant 119 | 1 | 1 | 3.5472 | 3.3747 |
| Plant 120 | 0 | 1 | 2.4497 | 2.3085 |
| Plant 121 | 1 | 1 | 4.1965 | 3.9772 |
| Plant 122 | 1 | 0 | 3.8719 | 3.6731 |
| Plant 123 | 1 | 1 | 4.5964 | 4.3886 |
| Plant 124 | 1 | 1 | 3.8232 | 3.667 |
| Plant 125 | | | 4.7023 | 4.4466 |
| Plant 126 | | | 3.4026 | 3.2343 |
| Plant 127 | | | 3.2645 | 3.1016 |
| Plant 128 | | | 2.842 | 2.7461 |
| Plant 129 | | | 3.8524 | 3.6496 |
| Plant 130 | | | 4.7094 | 4.4891 |
| Plant 131 | | | 0.4548 | 0.4254 |
| Plant 132 | | | 3.3652 | 3.211 |
| Plant 133 | | | 3.2598 | 3.1137 |
| Plant 134 | | | BLQ | BLQ |
| Plant 135 | | | 3.3438 | 3.2074 |
| Plant 136 | | | 3.7641 | 3.5279 |
| Plant 137 | | | 3.6367 | 3.4453 |
| Plant 138 | 0 | 0 | 0.4207 | 0.3995 |
| Plant 139 | | | 2.2626 | 2.0909 |
| Plant 140 | | | 4.102 | 3.8806 |
| Plant 141 | | | 4.4366 | 4.2298 |
| Plant 142 | | | 4.386 | 4.1759 |
| Plant 143 | | | 5.7992 | 5.4971 |
| Plant 144 | | | BLQ | BLQ |
| Plant 145 | | | 2.8282 | 2.6992 |
| Plant 146 | | | 2.7978 | 2.6543 |
| Plant 147 | | | 3.6949 | 3.5188 |
| Plant 148 | | | 2.3355 | 2.2257 |
| Plant 149 | | | 1.7436 | 1.6735 |
| Plant 150 | | | BLQ | BLQ |
| Plant 151 | | | 1.2908 | 1.2512 |
| Plant 152 | | | 2.09 | 1.999 |
| Plant 153 | | | 3.2661 | 3.1309 |
| Plant 154 | | | BLQ | BLQ |
| Plant 155 | | | 2.9794 | 2.8095 |
| Plant 156 | | | 5.3031 | 5.0703 |
| Plant 157 | | | 3.6654 | 3.4826 |
| Plant 158 | | | 3.7191 | 3.5198 |
| Plant 159 | | | 3.5148 | 3.359 |
| Plant 160 | | | 3.0729 | 2.9446 |
| Plant 161 | | | 4.0171 | 3.8311 |
| Plant 162 | | | 2.4201 | 2.3083 |
| Plant 163 | | | 4.4837 | 4.2994 |
| Plant 164 | | | 3.5759 | 3.4229 |
| Plant 165 | | | 3.8303 | 3.6354 |
| Plant 166 | | | 4.0415 | 3.8397 |
| Plant 167 | | | 2.3684 | 2.2563 |
| Plant 168 | | | 3.5194 | 3.3464 |
| Plant 169 | | | 4.3816 | 4.1756 |
| Plant 170 | | | 3.7741 | 3.5736 |
| Plant 171 | | | 2.1715 | 2.0453 |
| Plant 172 | | | 6.5454 | 6.1323 |
| Plant 173 | | | 6.9723 | 6.6948 |

TABLE 7
The observed segregation ratio for nic1 and nic2 in the studied F₂
population are not significantly different from the expected segregation
ratio of 9:3:3:1 at a significance threshold of 0.05 (χ² = 0.9827, df = 3,
P value = 0.1944).

| | | | Number of |
|---|---|---|---|
| | | Number of | Plants |
| Genotype | Ratio Expected | Plants Expected | Observed |
| Nic1 Nic2 | 9/16 | 50.625 | 55 |
| Nic1 nic2 | 3/16 | 16.875 | 14 |
| nic1 Nic2 | 3/16 | 16.875 | 16 |
| nic1 nic2 | 1/16 | 5.625 | 5 |

TABLE 8
Average percent total alkaloid levels for each of the four genotypes
observed in the F₂ segregating population ((LA Burley 21 × TN
90 LC) (X)). Both the mean and standard deviation are shown. Number
indicates the number of plants for each genotype for which alkaloid
levels were measured. The number of plants for each genotype differs
from those listed in Table 7 because plants with alkaloid levels
below level of quantification (BLQ) are excluded here.

| | | | | Std Err | Lower | Upper |
|---|---|---|---|---|---|---|
| Genotype | Number | Mean | Std Dev | Mean | 95% | 95% |
| Nic1 Nic2 | 49 | 3.8419 | 0.74094 | 0.10585 | 3.6291 | 4.0547 |
| Nic1 nic2 | 13 | 3.18588 | 1.43233 | 0.39726 | 2.3203 | 4.0514 |
| nic1 Nic2 | 15 | 2.43933 | 0.58525 | 0.15111 | 2.1152 | 2.7634 |
| nic1 nic2 | 3 | 0.47393 | 0.09385 | 0.05419 | 0.2408 | 0.7071 |

### Example 4: Identification of Genes in Nic1 Deletion Based on the Expression Pattern of Genes in the Identified Nic1 Deletion Segment

[0344] The identified Nic1 deletion segment, NT1.0-Scaffold0002504, has at least 20 annotated genes. Their expression patterns were analyzed in tobacco roots based on a Root RNASeq dataset. The Root RNASeq dataset were constructed based on RNA-sequencing and transcriptional profiling of root tissues from four varieties: BU21, HI BU21, LI BU21 and LA BU21.

[0345] Tobacco plants of these four varieties were grown in the greenhouse until a majority of the lines started budding, and then root and leaf tissue samples were harvested. Root tissue (˜100 mg) from 15 plants each of the four varieties, from untopped plants and topped plants were collected. Table 9 provides details of the number of samples, time points and conditions at which sample was collected from these plants. Roots from each genotype were harvested at various time points. RNA was extracted from the roots and pooled together to form two separate pooled samples for each genotype; one before topping and one after. Specifically, tobacco roots were flash frozen in liquid nitrogen and then macerated using 2000 Geno/Grinder Spex sample prep. The macerated tissue was further used for RNA extraction on the automated Maxwell ® 16 systems (Promega, Madison, Wis.), using the tissue RNA extraction kit (Promega, Madison, Wis.). The isolated RNA was quantified using a Nanodrop1000 to confirm that all samples met the minimum yield required for 2×100 bp paired end sequencing using HiSeq2000.

[0346] After sequencing, the raw RNASeq reads were trimmed and further filtered. The filtered RNASeq reads were then mapped to ALCS's proprietary tobacco genome using the transcriptome mapping application in CLC genomics workbench v.7.1 (Qiagen, N.V., Velno, The Netherlands). The raw expression of a gene is measured as the number of mapped reads for each of the 204,695 annotated genes within the tobacco genome. The gene expression value for each gene was then normalized using the reads per kilobase of transcript per million mapped reads (RPKM) values to obtain relative levels of gene expression.

[0347] Among the 20 genes annotated in the identified Nic1 deletion segment, NT1.0-Scafford0002504, 18 genes show no expression in any of the varieties at any condition. Only 2 genes were expressed in the root (Table 10). They are g100614_Scaffold0002504 and g100631_Scaffold0002504 (having genomic sequences of SEQ ID NOs: 28 and 13, cDNA sequences of SEQ ID NOs: 48 and 33, protein sequences of SEQ ID NOs: 68 and 53, respectively). Both expressed genes are annotated as “late blight resistance protein homolog”. Similar expression patterns were also observed for genes at Nic2 locus (Table 11).

TABLE 9
Tissue sampling designs for RNAseq-based transcriptional
profiling of tobacco roots.

| | Number of plants sampled | | | | | |
|---|---|---|---|---|---|---|
| | | Time point | | | | |
| Genotype | Condition | 30 mins | 2 hrs | 6 hrs | 24 hrs | 72 hrs |
| Burley 21 | Before Topping | 3 | 3 | 3 | 3 | 3 |
| | After Topping | 3 | 3 | 3 | 3 | 3 |
| HI | Before Topping | 3 | 3 | 3 | 3 | 3 |
| Burley 21 | After Topping | 3 | 3 | 3 | 3 | 3 |
| LI | Before Topping | 3 | 3 | 3 | 3 | 3 |
| Burley 21 | After Topping | 3 | 3 | 3 | 3 | 3 |
| LA | Before Topping | 3 | 3 | 3 | 3 | 3 |
| Burley 21 | After Topping | 3 | 3 | 3 | 3 | 3 |

### Example 5

### Identification of Genes Regulated by Nic1 and Nic2

[0348] The Root RNASeq dataset from Example 4 also allowed the identification of genes, the expression of which is regulated by Nic1 or Nic2. Pairwise comparisons of gene expression in four varieties: BU21, HI BU21, LI BU21 and LA BU21 were performed. FIG. 1 shows the number of genes identified as up or down regulated between each possible pairwise combination of varieties at false discovery rate (FDR) corrected P value of 0.05.

[0349] The comparisons of BU21 vs LA BU21 and that of HI BU21 vs LA BU21 are the most informative, with identification of all genes in the Nicotine biosynthesis pathway post formation of Putrescine. The effects of Nic1 locus (present in BU21 and HI BU21, but absent in LA BU21) were also confirmed. FIG. 2 indicate some of the genes upregulated in presence of Nic1.

### Example 6

### Development of Molecular Markers at or Near Nic1 and Nic2 Deletion Segments

[0350] The identified Nic1 deletion segment, NT1.0-Scaffold0002504, has a length of at least 544,860 bps. Within this segment, at least 207 variant sites were detected between a reference TN90 genome sequence and BU21 lines representing a pattern of deletion (Table 3).

[0351] The identified Nic2 deletion segment within scaffoldNT1.0-Scaffold0000549 (total length of NT1.0-Scaffold0000549 =1,142,469 bps), has a length of at least 820,000 bps. Within this segment, at least 340 polymorphic sites were detected between a reference TN90 genome sequence and Burley 21 lines representing a pattern of deletion (Table 4).

### Example 7

### Breeding of Tobacco Varieties Containing Low Nicotine

[0352] The identified nic1 deletion segment, genes within, and molecular markers associated therewith are used to breed and produce low nicotine tobacco hybrids, varieties, and lines which comprise a nic1 deletion or partial deletion. These genes and markers are also used to screen for additional nic1 and nic2 alleles from various Nicotiana germplasm, for example, different Nicotiana species or Nicotiana tabacum lines. A collection of forty-three Nicotiana species, forty-nine Nicotiana rustica lines, and approximately six hundred Nicotiana tabacum lines that can be screened is provided in Table 8 of U.S. Patent No. 7,700,834.

[0353] Germplasm identified as having novel nic1 or nic2 alleles is used as source material for breeding with cultivated tobaccos. Interspecific or intraspecific hybridization methods combined with standard breeding methods, such as backcrossing or the pedigree method, may be used to transfer a desirable nic1 or nic2 mutant allele from the donor source to cultivated tobaccos. For example, a low-nicotine variety comprising a nic1 , nic2, or both mutant alleles (e.g., a donor parent such as LA Burley 21) is crossed to an elite high-nicotine variety having a desirable genetic background and agronomically elite traits. F₁ progeny plants from this cross is optionally assayed for one or more molecular markers exemplified in Tables 9 and 10. An F₁ progeny plant is then backcrossed with the parent elite high-nicotine variety (recurrent parent). Plants from the BC1 generation are genotyped using molecular markers exemplified in Tables 9 and 10 to select for tobacco plants with smaller nic1 or nic2 deletion segments. After multiple rounds of backcrossing (e.g., 5-7 generations), an new elite tobacco variety is obtained comprising both a low-nicotine trait and other desirable traits from the recurrent parent elite line. This new elite tobacco variety is also free to any genetic drag associated with the low-nicotine trait due to genetic recombination events around Nic1 and Nic2 loci. These recombination events unlink nic1 and nic2 mutations from any associated detrimental mutations and thus reduce or avoid genetic drag. Using the above breeding and marker-assisted selection strategy, one can also achieve the pyramiding or stacking of a low-nicotine trait with other transgenes or natural alleles that reduce nicotine or nornicotine levels.

[0354] Low-nicotine tobacco hybrids, varieties, or lines can be made as a Burley type, a dark type, a flue-cured type, a Maryland type or an Oriental type tobacco, or can be essentially derived from BU 64, CC 101, CC 200, CC 27, CC 301, CC 400, CC 500, CC 600, CC 700, CC 800, CC 900, Coker 176, Coker 319, Coker 371 Gold, Coker 48, CU 263, DF911, Galpao tobacco, GL 26H, GL 350, GL 600, GL 737, GL 939, GL 973, HB 04P, K 149, K 326, K 346, K 358, K394, K 399, K 730, KDH 959, KT 200, KT204LC, KY 10, KY 14, KY 160, KY 17, KY 171, KY 907, KY907LC, KTY14 x L8 LC, Little Crittenden, McNair 373, McNair 944, msKY 14xL8, Narrow Leaf Madole, NC 100, NC 102, NC 2000, NC 291, NC 297, NC 299, NC 3, NC 4, NC 5, NC 6, NC7, NC 606, NC 71, NC 72, NC 810, NC BH 129, NC 2002, Neal Smith Madole, OXFORD 207, ‘Perique’ tobacco, PVH03,

[0355] PVH09, PVH19, PVH50, PVH51, R 610, R 630, R 7-11, R 7-12, RG 17, RG 81, RG H51, RGH 4, RGH 51, RS 1410, Speight 168, Speight 172, Speight 179, Speight 210, Speight 220, Speight 225, Speight 227, Speight 234, Speight G-28, Speight G-70, Speight H-6, Speight H20, Speight NF3, TI 1406, TI 1269, TN 86, TN86LC, TN 90, TN 97, TN97LC, TN D94, TN D950, TR (Tom Rosson) Madole, VA 309, or VA359, Maryland 609, HB3307PLC,

[0356] HB4488PLC, KT206LC, KT209LC, KT210LC, KT212LC, R610LC, PVH2310, NC196, KTD14LC, KTD6LC, KTD8LC, PD7302LC, PD7305LC, PD7309LC, PD7318LC, PD7319LC, PD7312LC, ShireyLC, or any commercial tobacco variety according to standard tobacco breeding techniques known in the art.

TABLE 10
Genes annotated in a Nic1 deletion scaffold, NT1.0-Scaffold0002504 (SEQ ID No. 1).

| | | | | | Refined | | Amino |
|---|---|---|---|---|---|---|---|
| | | | | Genomic | genomic | cDNA | acid |
| | | | | sequence | sequence | sequence | sequence |
| Gene | Blast Hit Description | Start | End | (SEQ ID) | (SEQ ID) | (SEQ ID) | (SEQ ID) |
| g100624_Scaffold0002504 | gi\|113205363\|gb\|AAT66771.2\| Putative polyprotein, | 23574 | 44762 | 9 | | 29 | 49 |
| | identical [Solanum demissum] | | | | | | |
| g100616_Scaffold0002504 | gi\|113205363\|gb\|AAT66771.2\| Putative polyprotein, | 49007 | 62258 | 10 | | 30 | 50 |
| | identical [Solanum demissum] | | | | | | |
| g100619_Scaffold0002504 | gi\|460410342\|ref\|XP_004250589.1\| PREDICTED: | 63561 | 67079 | 11 | | 31 | 51 |
| | uncharacterized protein LOC101263780 [Solanum | | | | | | |
| | lycopersicum] | | | | | | |
| g100629_Scaffold0002504 | gi\|113205363\|gb\|AAT66771.2\| Putative polyprotein, | 72790 | 84448 | 12 | | 32 | 52 |
| | identical [Solanum demissum] | | | | | | |
| g100631_{—}Scaffold0002504 | gi\|460370553\|ref\|XP_{—}004231117.11\| PREDICTED: | 124722 | 127361 | 13 | | 33 | 53 |
| | putative late blight resistance protein homolog | | | | | | |
| | R1A-10-like [ [symbol] ] | | | | | | |
| g100627_Scaffold0002504 | gi\|113205316\|gb\|ABI34339.1\| Polyprotein, 3′- | 130345 | 131552 | 14 | | 34 | 54 |
| | partial, putative [Solanum demissum] | | | | | | |
| g100630_Scaffold0002504 | gi\|113205316\|gb\|ABI34339.1\| Polyprotein, 3′- | 146435 | 147770 | 15 | | 35 | 55 |
| | partial, putative [Solanum demissum] | | | | | | |
| g100633_Scaffold0002504 | gi\|113205316\|gb\|ABI34339.1\| Polyprotein, 3′- | 174793 | 179215 | 16 | | 36 | 56 |
| | partial, putative [Solanum demissum] | | | | | | |
| g100620_Scaffold0002504 | NA | 186534 | 189120 | 17 | | 37 | 57 |
| g100625_Scaffold0002504 | gi\|460395064\|ref\|XP_004243109.1\| PREDICTED: | 247160 | 250636 | 18 | | 38 | 58 |
| | uncharacterized protein LOC101263429 [Solanum | | | | | | |
| | lycopersicum] | | | | | | |
| g100615_Scaffold0002504 | gi\|113205363\|gb\|AAT66771.2\| Putative polyprotein, | 263965 | 268932 | 19 | | 39 | 59 |
| | identical [Solanum demissum] | | | | | | |
| g100618_Scaffold0002504 | gi\|460410504\|ref\|XP_004250667.1\| PREDICTED: | 282902 | 284495 | 20 | | 40 | 60 |
| | uncharacterized protein LOC101267192 [Solanum | | | | | | |
| | lycopersicum] | | | | | | |
| g100622_Scaffold0002504 | NA | 305097 | 306605 | 21 | 75 | 41 | 61 |
| g100617_Scaffold0002504 | gi\|113205345\|gb\|AAT38783.2\| hypothetical | 351391 | 354310 | 22 | 76 | 42 | 62 |
| | protein SDM1_46t00006 [Solanum demissum] | | | | | | |
| g100621_Scaffold0002504 | gi\|113205363\|gb\|AAT66771.2\| Putative polyprotein, | 385927 | 388324 | 23 | 77 | 43 | 63 |
| | identical [Solanum demissum] | | | | | | |
| g100632_Scaffold0002504 | NA | 421150 | 422045 | 24 | 78 | 44 | 64 |
| g100628_Scaffold0002504 | NA | 427647 | 432434 | 25 | 79 | 45 | 65 |
| gl00623_Scaffold0002504 | gi\|89179421\|gb\|ABD63156.1\| Retrotransposon gag | 471868 | 472786 | 26 | 80* | 46 | 66 |
| | protein [Asparagus officinalis] | | | | | | |
| g100626_Scaffold0002504 | gi\|147845547\|emb\|CAN78493.1\| hypothetical | 477222 | 483825 | 27 | 81 | 47 | 67 |
| | protein VITISV_037041 [Vitis vinifera] | | | | | | |
| g100614_{—}Scaffold0002504 | gi\|460406698\|ref\|XP_{—}004248798.1\| PREDICTED: | 530011 | 535390 | 28 | 82 | 48 | 68 |
| | putative late blight resistance protein homolog | | | | | | |
| | R1B-14-like [ [symbol] ] | | | | | | |

“Start” and “End” denote the starting and ending nucleotide positions of the annotated genes on scaffold NT1.0-Scaffold0002504. Only two bolded genes (g100631_Scaffold0002504 and g100614_Scaffold0002504) were observed to express in the root of BU21 and HI BU21 both before and after topping. No expression of these two genes were detected in LI BU21 or LA BU21 roots. All other listed genes show no root expression in BU21, HI BU21, LI BU21, or LA BU21 based on the Root RNASeq dataset. The asterisk (*) indicates that SEQ ID Nos. 83 and 84 correspond to refined cDNA and amino acid sequences of SEQ ID NO. 80, respectively.

TABLE 11
Genes annotated in a Nic2 deletion scaffold, NT1.0-Scaffold0000549 (SEQ ID No. 2). “Start” and “End” denote the starting and
ending nucleotide positions of the annotated genes on scaffold NT1.0-Scaffold0002504. Only three bolded genes (g38885_Scaffold0000549,
g38878_Scaffold0000549 and g38864_Scaffold0000549) were observed to express in the root of BU21 and LI BU21 both before and after
topping. No expression of these three genes were detected in HI BU21 or LA BU21 roots. All other listed genes show no root expression in
BU21, HI BU21, LI BU21, or LA BU21 based on the Root RNASeq dataset.

| Gene | Blast Hit Description | Start | End |
|---|---|---|---|
| g38875_Scaffold0000549 | gi\|47824950\|gb\|AAT38724.1\|Putative retrotransposon protein, | 1064 | 2604 |
| | identical [Solanum demissum] | | |
| g38854_Scaffold0000549 | gi\|460414233\|ref\|XP_004252477.1\|PREDICTED: uncharacterized protein LOC101245629 | 12488 | 12827 |
| | [Solanum lycopersicum] | | |
| g38847_Scaffold0000549 | gi\|460407027\|ref\|XP_004248959.1\|PREDICTED: uncharacterized protein LOC101266468 | 40706 | 42338 |
| | [Solanum lycopersicum] | | |
| g38857_Scaffold0000549 | gi\|460410342\|ref\|XP_004250589.1\|PREDICTED: uncharacterized protein LOC101263780 | 63740 | 66314 |
| | [Solanum lycopersicum] | | |
| g38861_Scaffold0000549 | gi\|460395064\|ref\|XP_004243109.1\|PREDICTED: uncharacterized protein LOC101263429 | 69289 | 71053 |
| | [Solanum lycopersicum] | | |
| g38873_Scaffold0000549 | gi\|460407027\|ref\|XP_004248959.1\|PREDICTED: uncharacterized protein LOC101266468 | 71359 | 78187 |
| | [Solanum lycopersicum] | | |
| g38871_Scaffold0000549 | gi\|460415745\|ref\|XP_004253217.1\|PREDICTED: uncharacterized protein LOC101263890 | 99417 | 112568 |
| | [Solanum lycopersicum] | | |
| g38850_Scaffold0000549 | NA | 136925 | 137758 |
| g38855_Scaffold0000549 | NA | 141858 | 144628 |
| g38872_Scaffold0000549 | NA | 147982 | 150752 |
| g38849_Scaffold0000549 | gi\|47865536\|emb\|CAN81563.1\|hypothetical protein VITISV_019697 [Vitis vinifera] | 151800 | 153027 |
| g38866_Scaffold0000549 | gi\|460407027\|ref\|XP_004248959.1\|PREDICTED: uncharacterized protein LOC101266468 | 159812 | 161152 |
| | [Solanum lycopersicum] | | |
| g38853_Scaffold0000549 | gi\|460407027\|ref\|XP_004248959.1\|PREDICTED: uncharacterized protein LOC101266468 | 165374 | 166727 |
| | [Solanum lycopersicum] | | |
| g38868_Scaffold0000549 | NA | 205238 | 206813 |
| g38884_Scaffold0000549 | gi\|460406842\|ref\|XP_004248867.1\|PREDICTED: putative ribonuclease H protein | 223785 | 228636 |
| | At1g65750-like [Solanum lycopersicum] | | |
| g38876_Scaffold0000549 | NA | 246679 | 246970 |
| g38856_Scaffold0000549 | NA | 263028 | 264922 |
| g38859_Scaffold0000549 | NA | 267551 | 269920 |
| g38848_Scaffold0000549 | gi\|460410377\|ref\|XP_004250606.1\|PREDICTED: uncharacterized protein LOC101247390 | 274617 | 278325 |
| | [Solanum lycopersicum] | | |
| g38885_Scaffold0000549 | gi\|296278604\|gb\|ADH04266.1\|ERF1 [ [symbol] ] | 279007 | 279583 |
| g38862_Scaffold0000549 | NA | 281949 | 283475 |
| g38877_Scaffold0000549 | gi\|147773804\|emb\|CAN60970.1\|hypothetical protein VITISV_026408 [Vitis vinifera] | 313840 | 316312 |
| g38869_Scaffold0000549 | gi\|147775355\|emb\|CAN65719.1\|hypothetical protein VITISV_020846 [Vitis vinifera] | 320254 | 322003 |
| g38881_Scaffold0000549 | gi\|460410342\|ref\|XP_004250589.1\|PREDICTED: uncharacterized protein LOC101263780 | 336602 | 338552 |
| | [Solanum lycopersicum] | | |
| g38852_Scaffold0000549 | gi\|113205363\|gb\|AAT66771.2\|Putative polyprotein, identical [Solanum demissum] | 352315 | 358329 |
| g38886_Scaffold0000549 | gi\|460387720\|ref\|XP_004239522.1\|PREDICTED: uncharacterized protein LOC101244956 | 359255 | 372066 |
| | [Solanum lycopersicum] | | |
| g38878_Scaffold0000549 | gi\|296278604\|gb\|ADH04266.1\|ERF1 [ [symbol] ] | 372621 | 375461 |
| g38860_Scaffold0000549 | gi\|460366233\|ref\|XP_004228993.1\|PREDICTED: uncharacterized protein LOC101255727 | 386045 | 387443 |
| | [Solanum lycopersicum] | | |
| g38864_Scaffold0000549 | gi\|296278604\|gb\|ADH04266.1\|ERF1 [ [symbol] ] | 416812 | 419577 |
| g38863_Scaffold0000549 | NA | 449315 | 449560 |
| g38865_Scaffold0000549 | NA | 449684 | 449943 |
| g38879_Scaffold0000549 | gi\|470132088\|ref\|XP_004301918.1\|PREDICTED: uncharacterized protein LOC101298139 | 456673 | 458830 |
| | [Fragaria vesca subsp. vesca] | | |
| g38867_Scaffold0000549 | gi\|460395064\|ref\|XP_004243109.1\|PREDICTED: uncharacterized protein LOC101263429 | 550298 | 551726 |
| | [Solanum lycopersicum] | | |
| g38883_Scaffold0000549 | NA | 666517 | 668921 |
| g38846_Scaffold0000549 | NA | 679387 | 681160 |
| g38843_Scaffold0000549 | gi\|113205316\|gb\|ABI34339.1\|Polyprotein, 3′-partial, putative [Solanum demissum] | 696597 | 697503 |
| g38880_Scaffold0000549 | gi\|4406792\|gb\|AAD20101.1\|putative retroelement pol polyprotein [Arabidopsis thaliana] | 748082 | 752804 |
| g38870_Scaffold0000549 | gi\|156603850\|ref\|XP_001618917.1\|hypothetical protein NEMVEDRAFT_v1g68789 | 766567 | 768613 |
| | [Nematostella vectensis]gi\|156200895\|gb\|ED026817.1\|predicted protein [Nematostella | | |
| | vectensis] | | |
| g38874_Scaffold0000549 | gi\|460415871\|ref\|XP_004253277.1\|PREDICTED: uncharacterized protein LOC101244169 | 769094 | 773060 |
| | [Solanum lycopersicum] | | |
| g38844_Scaffold0000549 | gi\|460415745\|ref\|XP_004253217.1\|PREDICTED: uncharacterized protein LOC101263890 | 781866 | 785313 |
| | [Solanum lycopersicum] | | |

### Example 8

### Development of Tobacco Varieties with Desirable Nicotine Levels via a Transgenic Approach

[0357] Both overexpression and suppression approaches are taken to investigate the function of Nic1 genes. Two sets of transgenic plants are generated, one using the full length coding sequence and the other using an RNAi sequence. For expression of the full length coding sequence or the RNAi sequence, an expression vector can be constructed to have a CsVMV promoter and a NOS terminator, as well as a cassette having a Kanamycin selection marker (NPT II) under direction of an actin2 promoter and having a NOS terminator. Exemplary transformation cassette sequences of RNAi constructs targeting genes in Nic deletion segment can be found in SEQ ID Nos: 69 and 70. One of ordinary skill in the art understands that other target sequences can be used in constructing RNAi constructs or other transgenic approach for gene silencing (e.g., artificial microRNA, trans-acting siRNA, etc.).

[0358] Nucleic acid constructs carrying transgenes of interest are introduced into tobacco leaf disc using DNA bombardment or a biolistic approach. See, for example, Sanford et al., 1993, Methods Enzymol., 217:483-510; and Okuzaki and Tabei, 2012, Plant Biotechnology, 29:307-310. Briefly, the plasmid DNA containing the transformation cassette is coated on 1 μm gold particles (DNA/gold) as follows. The 1 μm gold particles are baked at 180° C. for 12 hours, and a stock solution (40 mg/ml) is prepared. To make a mixture for 10 shots, 100 μl of the stock solution is mixed with 40 μl of expression vector DNA (1 μg/μl), 100 μl of 2.5 M CaCl₂, and 40 μl of 0.1 M spermidine in a 1.5-ml tube. The mixture is centrifuged for 30 s at 13,000×g, and the pellet is washed with 500 μl 100% ethanol. The DNA/gold mixture is suspended in 100 μl of water, and 10 μl is applied onto a macrocarrier, dried, and then bombarded. Two shots are bombarded per plate using a 1,100 psi rupture disc under partial vacuum (711 mmHg) in a PDS-1000/He system (Bio-Rad Laboratories, Hercules, Calif, USA). Narrow Leaf Madole (NLM) and Tennessee 90 (TN90) tobacco leaf discs are used for transformation with the RNAi constructs, and with the full length gene constructs. Whole tobacco leaf (about 45×30 mm in length) is placed on the MS medium overnight, and the leaf disc is bombarded with the construct on the second day. Leaves are then cut into small pieces (about 5×5 mm) and replaced on the TOM medium (MS medium with 20 g sucrose/L; 1 mg/L IAA and 2.5 mg/L BAP) to grow at 27° C. for 3-5 days, then transferred to TOM medium to grow, which contains 300 mg/l Kanamycin (TOM-Kan). Tissues are transferred to new TOM-Kan plates every 2-3 weeks for 4-6 weeks (27° C., 16 h light). Kanamycin-resistant primary shoots are regenerated at 4-6 weeks after bombardment. Shoots are transferred to MS-Kanamycin plates to grow root. The leaves and/or roots from T1 plants (and subsequent generations) are then evaluated to determine the amount of one or more alkaloids and/or one or more TSNAs.

### Example 9

### Development of Novel nic1 Mutations via Random Mutagenesis

[0359] Random mutagenesis of tobacco plants are performed using Ethyl methanesulfonate (EMS) mutagenesis or fast neutron bombardment. EMS mutagenesis consists of chemically inducing random point mutations over the length of the genome. Fast neutron mutagenesis consists of exposing seeds to neutron bombardment which causes large deletions through double stranded DNA breakage.

[0360] For EMS mutagenesis, one gram (approximately 10,000 seeds) of Tennessee 90 tobacco (TN90) seeds are washed in 0.1% Tween for fifteen minutes and then soaked in 30 ml of ddH2O for two hours. One hundred fifty (150) μl of 0.5% EMS (Sigma, Catalogue No. M-0880) is then mixed into the seed/ddH2O solution and incubated for 8-12 hours (rotating at 30 rpm) under a hood at room temperature (RT; approximately 20° C.). The liquid then is removed from the seeds and mixed into 1 M NaOH overnight for decontamination and disposal. The seeds are then washed twice with 100 ml ddH2O for 2-4 hours. The washed seeds were then suspended in 0.1% agar solution.

[0361] The EMS-treated seeds in the agar solution are evenly spread onto water-soaked Carolina's Choice Tobacco Mix (Carolina Soil Company, Kinston, N.C.) in flats at 2000 seeds/flat. The flats are then covered with plastic wrap and placed in a growth chamber.

[0362] Once the seedlings emerge from the soil, the plastic wrap is punctured to allow humidity to decline gradually. The plastic wrap is completely removed after two weeks. Flats are moved to a greenhouse and fertilized with NPK fertilizer. The seedlings re plugged into a float tray and grown until transplanting size. The plants are subsequently transplanted into a field. During growth, the plants self-pollinate to form M1 seeds. At the mature stage, five capsules are harvested from each plant and individual designations are given to the set of seeds from each plant. This forms the M1 population. A composite of M1 seed from each M0 plant are grown, and leaves from M1 plants are collected for DNA extraction. Target genes are amplified and sequenced for mutation identification.

### Example 10

### Development of Novel nic1 Mutations via Targeted Mutagenesis

[0363] Tobacco lines with low nicotine while maintaining high leaf quality are produced by introducing mutations into Nic1 locus via precise genome engineering technologies, for example, Transcription activator-like effector nucleases (TALENs), meganuclease, zinc finger nuclease, and CRISPR. Genome modifications are made in commercial tobacco varieties such as TN90, K326 and Narrow Leaf Madole.

[0364] For example, specific target sequences from Nic1 genes can serve as TALEN target binding regions. The TALEN sites are specific for the single gene or a DNA segment from Nic1 locus. TALEN regions 1 and 2 would be used to disrupt a critical region of Nic1 and partial fuse together to create long stretch deletion but smaller than entire Nic1 deletion region. The plants created will be expected to have low nicotine contents but high leaf quality.

[0365] Based on target DNA sequences, sequences for transcription activator like (TAL) effector proteins are synthesized and cloned into plant expression vectors to serve as entry vectors. Depending on the purpose, different protocols are used to generate mutagenic tobacco lines: 1) one or more entry vectors (pALCS1 containing the target TALs) are directly transformed into tobacco protoplasts to generate random sequence deletion or insertion mutagenic tobacco lines; 2) a donor sequence (e.g., a reporter gene, e.g., the GUS gene) flanked on the left and right side with sequences that are homologous with the target insertion sequence is co-transformed into tobacco protoplasts with one or more entry vectors (pALCS1 containing the target TALs) to generated mutagenic tobacco lines containing a reporter gene; and 3) a donor sequence containing target TALs that have a point mutation is co-transformed into tobacco protoplasts with one or more entry vectors (pALCS1 containing the target

[0366] TALs) to generated mutagenic tobacco lines having a point mutation; 4) a donor sequence containing a tissue specific promoter sequence to generate mutant tobacco lines that express the endogenous gene in a tissue specific manner; and 5) a donor sequence containing a combination of the aforementioned donor sequences with a reporter gene construct to facilitate mutant tobacco screening.

[0367] Tobacco protoplasts are isolated from TN90 tobacco leaves growing in Magenta boxes in a growth chamber. Well-expanded leaves (5 cm) from 3-4-week-old plants are cut into 0.5 to 1-mm leaf strips from the middle part of a leaf. Leaf strips are transferred into the prepared enzyme solution (1% cellulase R10, 0.25% macerozyme R10, 0.4 M mannitol, 20 mM KCl, 20 mM MES (pH 5.7), 10 mM CaC12, 0.1% BSA) by dipping both sides of the strips. Leaf strips are vacuum infiltrated for 30 min in the dark using a desiccator with continuing digestion in the dark for 4 hour to overnight at room temperature without shaking. Protoplasts are filtered in 100 μm nylon filter and purified with 3 ml Lymphoprep. Protoplasts are centrifuged and washed with W5n solution (154 mM NaCl, 125 mM CaCl₂, 5 mM KCl, 2 mM MES, 991 mg/l glucose pH 5.7) and suspended in W5n solution at the concentration of 5×105/ml. Protoplasts are kept on ice for 30 min to settle at the bottom of the tube by gravity. W5n solution was moved and protoplasts were re-suspended in P2 solution at room temperature. 50 μl DNA (10-20 μg of plasmid), 500 μl protoplasts (2×105 protoplasts) and 550 μl of PEG solution (40%, v/v 10 ml 4 g PEG4000, 0.2 M mannitol, 0.1 M CaCl2) are mixed gently in a 15-ml microfuge tube, and the mixture incubated at room temperature for 5 min.

[0368] Protoplasts are pelleted and re-suspended with 1 ml 2X 8EN1 (8EN1: MS salt without NH₄NO₃, MS vitamin, 0.2% myo-Inositol, 4 mM MES, 1 mg/l NAA, 1 mg/l IAA, 0.5 M mannitol, 0.5 mg/l BAP, 1.5% sucrose). Transformed protoplasts are jellified with equal amount of low-meting agarose (LMA), and 0.2 ml of protoplast-LAM is dropped to form a bead. 10 ml 8EN1 is added to the bead, and in 7 days, 5 ml 8EN1 is taken out and 5 ml 8EN2 (8EN1 with 0.25 M mannitol) is added; after another 7 days (14 day), 10 ml 8EN2 is taken out and 10 ml 8EN2 is added; in another 7 days (21 day), 5 ml 8EN2 is taken out and 5 ml 8EN3 (8EN1 with 3% sucrose and without mannitol) is added; after another 7 days (28 day), 10 ml 8EN3 is taken out and 10 ml 8EN3 is added. Protoplasts are kept for two weeks until micro-callus growth. Callus is transferred to NCM solid media until it reaches about 5 mm (usually about two weeks). Callus was transferred to TOM-Kan solid media to grow shoots, and transformed tobacco plants were regenerated using the methods described herein.

### Example 11

### Further Genetic Confirmation of the Identified Nic1 Lesion

[0369] A genetic segregation analysis was conducted in an F₂ population of 522 plants from a cross between TN90 with LA BU21 (Table 12). This F₂ population ((LA Burley 21×TN 90 LC) (X)) was subject to PCR-based genotyping of the Nic1 and Nic2 loci as described in Example 3. The percent total alkaloid and percent nicotine levels of each plant were also measured as in Example 3. Briefly, tobacco samples were collected at an intermediate growth stage (layby stage) for genotyping. The plants were topped at an elongated bud stage. Samples for chemistry analysis were taken two weeks after topping of the plants.

[0370] The genotypic data again confirm a segregation ratio of 9:3:3:1 for the Nic1 and Nic2 loci in the F₂ population. Average percent total alkaloid and average percent nicotine levels in each of the four genotypes are also consistent with the segregation data and the earlier observation that nic1 has a stronger effect than nic2 over the total alkaloid and nicotine levels (Tables 13 and 14). The genotype and chemistry data of this F₂ population are further shown in FIGS. 3 and 4 by plotting the chemistry (y axis) of each plant by it genotype (x axis). FIG. 4 differs from FIG. 3 in its exclusion of 8 plants that were likely switched due to sampling or processing errors.

[0371] Moreover, groups of isogenic BU21 low alkaloid series germplasm (LA BU21, LI BU21, HI BU21, and BU21) were tested across two years. The low alkaloid trait is not affected by year-to-year variations in leaf alkaloid levels. Shown is FIGS. 5 and 6, the percent reduction of nicotine content appeared consistent across two years, illustrating that the low alkaloid trait is not impacted by environmental factors or field conditions.

TABLE 12
Nic1 and Nic2 genotypes and alkaloid measurements of individual plants
of a larger F₂ population segregating for nic1 and nic2 ((LA Burley
21 × TN 90 LC) (X)). N/S represent no sample. Asterisks represent
four pairs (8 total having plant Nos: 163 and 164, 174 and 175, 361 and
362, 481 and 482, also in bold) of adjacent plants where DNA or leaf
samples were likely switched during either sampling, processing or
analysis stage. Each of the four pairs of plants were side by side
in the field.

| | | Nic2 | | |
|---|---|---|---|---|
| Plant | Nic1 (Present = 1, | (Present = 1, | Percent | Percent Total |
| No. | Deleted = 0) | Deleted = 0) | Nicotine | Alkaloids |
| 1 | 1 | 1 | 1.33 | 1.389 |
| 2 | 1 | 1 | 1.59 | 1.66 |
| 3 | 0 | 1 | 0.72 | 0.7511 |
| 4 | 1 | 1 | 2.59 | 2.753 |
| 5 | 1 | 0 | 0.81 | 0.8422 |
| 6 | 1 | 1 | 1.04 | 1.096 |
| 7 | 1 | 1 | 1.76 | 1.843 |
| 8 | 1 | 1 | 1.07 | 1.121 |
| 9 | 1 | 0 | 1.85 | 1.938 |
| 10 | 1 | 1 | 1.58 | 1.662 |
| 11 | 1 | 0 | 1.1 | 1.147 |
| 12 | 1 | 0 | 0.68 | 0.7045 |
| 13 | 1 | 1 | 1.33 | 1.39 |
| 14 | 1 | 0 | 1.77 | 1.828 |
| 15 | 1 | 1 | 1.83 | 1.93 |
| 16 | 1 | 1 | 3.34 | 3.513 |
| 17 | 0 | 0 | 0.059 | 0.0643 |
| 18 | 1 | 1 | 3.36 | 3.543 |
| 19 | 0 | 0 | 0.062 | 0.0661 |
| 20 | 1 | 1 | 2.31 | 2.437 |
| 21 | 1 | 0 | 1.23 | 1.286 |
| 22 | 1 | 0 | 1.61 | 1.701 |
| 23 | 1 | 1 | 1.18 | 1.241 |
| 24 | 0 | 0 | 0.106 | 0.1099 |
| 25 | 0 | 1 | 1.41 | 1.487 |
| 26 | 1 | 1 | 2.47 | 2.6 |
| 27 | 1 | 1 | 2.16 | 2.245 |
| 28 | 1 | 1 | 2.22 | 2.334 |
| 29 | 1 | 0 | 2.54 | 2.667 |
| 30 | 1 | 1 | 1.37 | 1.429 |
| 31 | 1 | 1 | 1.86 | 1.956 |
| 32 | 1 | 1 | 1.68 | 1.762 |
| 33 | 1 | 0 | 1.91 | 1.996 |
| 34 | 1 | 1 | 2.89 | 3.051 |
| 35 | 0 | 1 | 1.15 | 1.205 |
| 36 | 1 | 1 | 2.92 | 3.064 |
| 37 | 1 | 0 | 2.84 | 3.005 |
| 38 | 0 | 1 | 1.49 | 1.566 |
| 39 | 0 | 0 | 0.17 | 0.1796 |
| 40 | 1 | 0 | 3.02 | 3.211 |
| 41 | 1 | 0 | 1.29 | 1.35 |
| 42 | 1 | 1 | 1.73 | 1.805 |
| 43 | 1 | 0 | 1.37 | 1.469 |
| 44 | 1 | 1 | 2.18 | 2.279 |
| 45 | 0 | 0 | 0.16 | 0.1719 |
| 46 | 1 | 0 | 2.38 | 2.495 |
| 47 | 1 | 1 | 2.34 | 2.455 |
| 48 | 1 | 0 | 1.39 | 1.455 |
| 49 | 1 | 0 | 2.9 | 3.044 |
| 50 | 0 | 1 | 2.18 | 2.307 |
| 51 | 0 | 1 | 1.34 | 1.393 |
| 52 | 1 | 0 | 1.9 | 1.98 |
| 53 | 1 | 1 | 1.49 | 1.566 |
| 54 | 1 | 1 | 2.22 | 2.347 |
| 55 | 1 | 1 | 3.21 | 3.359 |
| 56 | 1 | 1 | 3.67 | 3.862 |
| 57 | 1 | 1 | 2.07 | 2.17 |
| 58 | 0 | 1 | 0.83 | 0.8704 |
| 59 | 1 | 1 | 2.37 | 2.492 |
| 60 | 1 | 1 | 2.25 | 2.395 |
| 61 | 1 | 1 | 2.53 | 2.678 |
| 62 | 1 | 1 | 2.19 | 2.326 |
| 63 | 1 | 1 | 1.92 | 1.997 |
| 64 | 1 | 1 | 3.06 | 3.229 |
| 65 | 1 | 1 | 3.2 | 3.369 |
| 66 | 1 | 1 | 2.83 | 2.997 |
| 67 | 1 | 1 | 4.07 | 4.257 |
| 68 | 1 | 1 | 2.4 | 2.498 |
| 69 | 0 | 1 | 1.66 | 1.734 |
| 70 | 1 | 1 | 1.93 | 2.045 |
| 71 | 1 | 1 | 3.79 | 3.99 |
| 72 | 0 | 0 | 0.079 | 0.0849 |
| 73 | 1 | 1 | 2.17 | 2.289 |
| 74 | 1 | 0 | 3.58 | 3.778 |
| 75 | 1 | 1 | 2.63 | 2.76 |
| 76 | 0 | 1 | 1.52 | 1.603 |
| 77 | 1 | 1 | 3.04 | 3.211 |
| 78 | 1 | 1 | 2.82 | 2.979 |
| 79 | 1 | 1 | 2.6 | 2.74 |
| 80 | 1 | 1 | 2.48 | 2.597 |
| 81 | 1 | 1 | 1.88 | 1.977 |
| 82 | 1 | 1 | 2.98 | 3.106 |
| 83 | 0 | 1 | 0.99 | 1.0255 |
| 84 | 0 | 0 | 0.3 | 0.3194 |
| 85 | 1 | 1 | 1.79 | 1.873 |
| 86 | 1 | 1 | 2.37 | 2.477 |
| 87 | 1 | 1 | 2.79 | 2.932 |
| 88 | 1 | 1 | 2.14 | 2.301 |
| 89 | 1 | 1 | 4.35 | 4.588 |
| 90 | 0 | 0 | 0.09 | 0.0972 |
| 91 | 0 | 1 | 1.59 | 1.67 |
| 92 | 1 | 0 | 1.71 | 1.789 |
| 93 | 1 | 1 | 3.94 | 4.114 |
| 94 | 1 | 1 | 2.65 | 2.755 |
| 95 | 0 | 1 | 1.14 | 1.211 |
| 96 | 1 | 0 | 2.14 | 2.248 |
| 97 | 1 | 1 | 2.62 | 2.743 |
| 98 | 1 | 0 | 0.95 | 0.9865 |
| 99 | 1 | 1 | 2.61 | 2.729 |
| 100 | 1 | 1 | 3.33 | 3.485 |
| 101 | 1 | 0 | 2.77 | 2.878 |
| 102 | 1 | 1 | 2.31 | 2.424 |
| 103 | 0 | 1 | 0.49 | 0.5099 |
| 104 | 1 | 1 | 2.5 | 2.611 |
| 105 | 0 | 1 | 0.97 | 1.012 |
| 106 | 1 | 1 | 2.29 | 2.404 |
| 107 | 1 | 1 | 1.11 | 1.16 |
| 108 | 1 | 0 | 1.87 | 1.947 |
| 109 | 0 | 1 | 0.95 | 1 |
| 110 | 1 | 1 | 3.05 | 3.209 |
| 111 | 1 | 0 | 3.28 | 3.437 |
| 112 | 1 | 0 | 3.46 | 3.637 |
| 113 | 1 | 1 | 4.33 | 4.594 |
| 114 | 1 | 1 | 4.35 | 4.552 |
| 115 | 1 | 1 | 3.56 | 3.746 |
| 116 | 0 | 1 | 1.85 | 1.93 |
| 117 | 1 | 1 | 5.94 | 6.305 |
| 118 | 0 | 1 | 1.47 | 1.559 |
| 119 | 1 | 1 | 3.8 | 4.028 |
| 120 | 0 | 1 | 1.9 | 2.007 |
| 121 | 1 | 0 | 3.38 | 3.573 |
| 122 | 0 | 0 | 0.3 | 0.3191 |
| 123 | 1 | 1 | 4.04 | 4.245 |
| 124 | 1 | 1 | 3.4 | 3.622 |
| 125 | 0 | 1 | 1.09 | 1.141 |
| 126 | 1 | 0 | 2.71 | 2.828 |
| 127 | 1 | 1 | 4.93 | 5.178 |
| 128 | 1 | 0 | 2.65 | 2.801 |
| 129 | 1 | 1 | 1.62 | 1.693 |
| 130 | 1 | 0 | 2.13 | 2.232 |
| 131 | 0 | 1 | 2.64 | 2.789 |
| 132 | 1 | 1 | 3.17 | 3.329 |
| 133 | 0 | 1 | 1.99 | 2.108 |
| 134 | 1 | 1 | 2.28 | 2.377 |
| 135 | 1 | 1 | 3.85 | 4.019 |
| 136 | 1 | 1 | 3.62 | 3.792 |
| 137 | 1 | 0 | 3.19 | 3.355 |
| 138 | 0 | 1 | 1.49 | 1.565 |
| 139 | 1 | 1 | 4.33 | 4.516 |
| 140 | 1 | 1 | 3.88 | 4.097 |
| 141 | 1 | 1 | 5.68 | 6.003 |
| 142 | 1 | 1 | 3.15 | 3.292 |
| 143 | 1 | 0 | 2.35 | 2.456 |
| 144 | 1 | 0 | 3.63 | 3.786 |
| 145 | 1 | 1 | 3.32 | 3.532 |
| 146 | 1 | 1 | 3.26 | 3.407 |
| 147 | 1 | 1 | 3.37 | 3.507 |
| 148 | 1 | 0 | 3.21 | 3.388 |
| 149 | 1 | 1 | 3.7 | 3.873 |
| 150 | 0 | 0 | 0.4 | 0.4279 |
| 151 | 1 | 1 | 1.41 | 1.482 |
| 152 | 1 | 1 | 2.18 | 2.273 |
| 153 | 1 | 1 | 2.58 | 2.725 |
| 154 | 0 | 1 | 2.89 | 3.088 |
| 155 | 1 | 1 | 1.51 | 1.593 |
| 156 | 0 | 1 | 2.03 | 2.143 |
| 157 | 0 | 1 | 2.03 | 2.151 |
| 158 | 1 | 0 | 1.27 | 1.323 |
| 159 | 1 | 1 | 1.62 | 1.734 |
| 160 | 1 | 1 | 4.48 | 4.67 |
| 161 | 1 | 1 | 1 | 1.045 |
| 162 | 1 | 1 | 3.17 | 3.309 |
| 163* | 1 | 1 | 0.18 | 0.1906 |
| 164* | 0 | 1 | 2.38 | 2.493 |
| 165 | 1 | 1 | 3.62 | 3.745 |
| 166 | 1 | 1 | N/S | N/S |
| 167 | 1 | 0 | 2.62 | 2.717 |
| 168 | 1 | 1 | 2.31 | 2.428 |
| 169 | 1 | 0 | 2.52 | 2.645 |
| 170 | 1 | 1 | 4.35 | 4.527 |
| 171 | 1 | 0 | 1.66 | 1.741 |
| 172 | 1 | 0 | 3.03 | 3.159 |
| 173 | 1 | 0 | 3.2 | 3.343 |
| 174* | 1 | 1 | 0.059 | 0.0653 |
| 175* | 0 | 0 | 4.03 | 4.197 |
| 176 | 1 | 1 | 2.85 | 3.01 |
| 177 | 1 | 1 | 2.91 | 3.086 |
| 178 | 1 | 1 | 4.21 | 4.395 |
| 179 | 1 | 1 | 1.09 | 1.154 |
| 180 | 0 | 1 | 1.15 | 1.206 |
| 181 | 1 | 0 | 3.2 | 3.345 |
| 182 | 1 | 1 | 3.28 | 3.406 |
| 183 | 1 | 1 | 3.17 | 3.324 |
| 184 | 1 | 0 | 3.24 | 3.392 |
| 185 | 1 | 1 | 0.94 | 0.987 |
| 186 | 1 | 1 | 3.95 | 4.123 |
| 187 | 1 | 0 | 0.68 | 0.7094 |
| 188 | 0 | 1 | 1.94 | 2.007 |
| 189 | 1 | 1 | 0.46 | 0.4809 |
| 190 | 0 | 1 | 2.28 | 2.356 |
| 191 | 1 | 1 | 2.25 | 2.336 |
| 192 | 1 | 0 | 2.74 | 2.842 |
| 193 | 1 | 1 | 3.9 | 4.091 |
| 194 | 1 | 1 | 3.39 | 3.578 |
| 195 | 1 | 0 | 2.59 | 2.698 |
| 196 | 0 | 0 | 0.131 | 0.1383 |
| 197 | 1 | 1 | 2.28 | 2.365 |
| 198 | 1 | 0 | 2.27 | 2.395 |
| 199 | 0 | 0 | 0.1 | 0.1063 |
| 200 | 1 | 1 | 2.39 | 2.496 |
| 201 | 0 | 1 | 1.02 | 1.09 |
| 202 | 1 | 1 | 1.99 | 2.09 |
| 203 | 1 | 1 | 3.44 | 3.594 |
| 204 | 1 | 1 | 3.05 | 3.167 |
| 205 | 0 | 1 | 0.85 | 0.8839 |
| 206 | 0 | 1 | 2.18 | 2.331 |
| 207 | 1 | 1 | 1.89 | 1.971 |
| 208 | 1 | 1 | 1.37 | 1.445 |
| 209 | 1 | 1 | 3.26 | 3.432 |
| 210 | 1 | 1 | 1.28 | 1.3224 |
| 211 | 0 | 1 | 1.86 | 1.966 |
| 212 | 1 | 1 | 1.53 | 1.59 |
| 213 | 0 | 0 | 0.142 | 0.1513 |
| 214 | 1 | 1 | 2.22 | 2.331 |
| 215 | 1 | 1 | 2.94 | 3.075 |
| 216 | 0 | 1 | 1.72 | 1.801 |
| 217 | 1 | 1 | 3.89 | 4.044 |
| 218 | 1 | 1 | 4.47 | 4.691 |
| 219 | 0 | 1 | 1.63 | 1.696 |
| 220 | 1 | 0 | 3.28 | 3.432 |
| 221 | 1 | 0 | 1.14 | 1.193 |
| 222 | 1 | 1 | 3.91 | 4.089 |
| 223 | 1 | 0 | 0.87 | 0.9002 |
| 224 | 1 | 1 | 1.8 | 1.891 |
| 225 | 1 | 1 | 2.25 | 2.369 |
| 226 | 1 | 0 | 2.59 | 2.738 |
| 227 | 0 | 1 | 0.89 | 0.933 |
| 228 | 0 | 1 | 0.64 | 0.669 |
| 227B | 1 | 1 | 1.38 | 1.439 |
| 228B | 1 | 1 | 3.25 | 3.421 |
| 229 | 1 | 0 | 3.57 | 3.71 |
| 230 | 0 | 1 | 2.43 | 2.583 |
| 231 | 1 | 1 | 3.23 | 3.398 |
| 232 | 1 | 1 | 4.85 | 5.187 |
| 233 | 0 | 1 | 1.09 | 1.138 |
| 234 | 0 | 0 | 0.24 | 0.2521 |
| 235 | 1 | 1 | 2.49 | 2.597 |
| 236 | 1 | 1 | 4.07 | 4.327 |
| 237 | 0 | 1 | 1.17 | 1.235 |
| 238 | 0 | 0 | 0.16 | 0.1683 |
| 239 | 1 | 1 | 3.18 | 3.323 |
| 240 | 1 | 0 | 2.39 | 2.5 |
| 241 | 1 | 1 | 1.72 | 1.805 |
| 242 | 0 | 1 | 0.95 | 0.992 |
| 243 | 0 | 1 | 0.75 | 0.787 |
| 244 | 1 | 1 | 2.28 | 2.398 |
| 245 | 1 | 1 | 1.89 | 1.989 |
| 246 | 1 | 0 | 3.91 | 4.084 |
| 247 | 1 | 0 | 2.53 | 2.648 |
| 248 | 0 | 1 | 0.68 | 0.7146 |
| 249 | 1 | 1 | 2.82 | 2.966 |
| 250 | 1 | 1 | 1.76 | 1.841 |
| 251 | 0 | 0 | 0.18 | 0.1936 |
| 252 | 1 | 1 | 1.39 | 1.452 |
| 253 | 1 | 1 | 3.54 | 3.722 |
| 254 | 1 | 1 | 4.05 | 4.247 |
| 255 | 1 | 1 | 2.09 | 2.192 |
| 256 | 1 | 1 | 1.47 | 1.551 |
| 257 | 1 | 0 | 2.54 | 2.677 |
| 258 | 1 | 1 | 3.83 | 4.002 |
| 259 | 1 | 0 | 1.23 | 1.301 |
| 260 | 1 | 1 | 1.92 | 2.017 |
| 261 | 1 | 1 | 2.17 | 2.323 |
| 262 | 1 | 0 | 2.41 | 2.552 |
| 263 | 1 | 0 | 2.3 | 2.435 |
| 262B | 1 | 0 | 1.34 | 1.408 |
| 263B | 1 | 1 | 3.39 | 3.577 |
| 264 | 0 | 1 | 1.98 | 2.093 |
| 265 | 0 | 1 | 0.8 | 0.854 |
| 266 | 1 | 1 | 1.76 | 1.863 |
| 267 | 1 | 1 | 1.87 | 1.989 |
| 268 | 0 | 0 | 0.19 | 0.2031 |
| 269 | 0 | 0 | 0.12 | 0.1293 |
| 270 | 0 | 1 | 0.57 | 0.607 |
| 271 | 0 | 0 | 0.139 | 0.1481 |
| 272 | 1 | 0 | 1.81 | 1.893 |
| 273 | 1 | 0 | 2.13 | 2.244 |
| 274 | 0 | 1 | 0.52 | 0.5523 |
| 275 | 0 | 1 | 1.7 | 1.805 |
| 276 | 1 | 0 | 1.83 | 1.922 |
| 277 | 1 | 1 | 2 | 2.101 |
| 278 | 0 | 1 | 0.91 | 0.9535 |
| 279 | 1 | 1 | 3.25 | 3.439 |
| 280 | 1 | 1 | 3.45 | 3.586 |
| 281 | 1 | 1 | 4.62 | 4.807 |
| 282 | 1 | 1 | 3.41 | 3.566 |
| 283 | 0 | 1 | 1.34 | 1.407 |
| 284 | 1 | 1 | 2.43 | 2.556 |
| 285 | 1 | 1 | 1.44 | 1.514 |
| 286 | 1 | 1 | 2.49 | 2.614 |
| 287 | 0 | 0 | 0.137 | 0.1445 |
| 288 | 1 | 1 | 1.78 | 1.863 |
| 289 | 0 | 1 | 0.53 | 0.5681 |
| 290 | 1 | 1 | N/S | N/S |
| 291 | 0 | 1 | 0.73 | 0.775 |
| 292 | 1 | 1 | 1.43 | 1.504 |
| 293 | 1 | 1 | 1.92 | 2.012 |
| 294 | 0 | 1 | 0.51 | 0.5388 |
| 295 | 1 | 0 | 2.07 | 2.181 |
| 296 | 1 | 1 | 1.4 | 1.463 |
| 297 | 1 | 1 | 4.21 | 4.548 |
| 298 | 1 | 0 | 3.11 | 3.225 |
| 299 | 1 | 1 | 3.93 | 4.158 |
| 300 | 1 | 1 | 1.99 | 2.062 |
| 301 | 0 | 1 | 0.56 | 0.5858 |
| 302 | 1 | 1 | 1.93 | 2.018 |
| 303 | 1 | 1 | 1.06 | 1.114 |
| 304 | 1 | 1 | 6.89 | 7.302 |
| 305 | 1 | 0 | 2.25 | 2.366 |
| 306 | 1 | 0 | 1.42 | 1.479 |
| 307 | 1 | 0 | 2.39 | 2.591 |
| 308 | 1 | 1 | 2.52 | 2.635 |
| 309 | 1 | 0 | 1.84 | 1.933 |
| 310 | 1 | 1 | 2.29 | 2.412 |
| 311 | 1 | 1 | 1.62 | 1.707 |
| 312 | 0 | 1 | 1.89 | 1.988 |
| 313 | 1 | 1 | 2.48 | 2.577 |
| 314 | 0 | 0 | 1.01 | 1.056 |
| 315 | 1 | 1 | 2.21 | 2.334 |
| 316 | 1 | 1 | 1.54 | 1.617 |
| 317 | 1 | 1 | N/S | N/S |
| 318 | 0 | 1 | 0.65 | 0.6821 |
| 319 | 1 | 1 | 3.32 | 3.493 |
| 320 | 1 | 0 | 2.68 | 2.8 |
| 321 | 1 | 1 | 2.71 | 2.835 |
| 322 | 1 | 0 | 1.97 | 2.068 |
| 323 | 1 | 1 | 2.76 | 2.905 |
| 324 | 1 | 0 | 3.92 | 4.122 |
| 325 | 1 | 0 | 2.56 | 2.724 |
| 326 | 1 | 1 | 3.18 | 3.355 |
| 327 | 0 | 1 | 2.08 | 2.165 |
| 328 | 1 | 0 | 2.77 | 2.89 |
| 329 | 1 | 1 | 2.11 | 2.216 |
| 330 | 1 | 0 | 1.81 | 1.878 |
| 331 | 0 | 0 | 0.2 | 0.2096 |
| 332 | 1 | 1 | 1.8 | 1.894 |
| 333 | 0 | 1 | 0.75 | 0.7875 |
| 334 | 1 | 0 | 2.78 | 2.92 |
| 335 | 0 | 0 | 0.19 | 0.2044 |
| 336 | 1 | 1 | 2.2 | 2.31 |
| 337 | 1 | 1 | 1.54 | 1.606 |
| 338 | 0 | 0 | 0.19 | 0.1986 |
| 339 | 1 | 1 | 2.05 | 2.153 |
| 340 | 1 | 0 | 1.57 | 1.644 |
| 341 | 1 | 1 | 2.64 | 2.768 |
| 342 | 1 | 1 | 2.4 | 2.522 |
| 343 | 1 | 1 | 2.1 | 2.213 |
| 344 | 1 | 1 | 2.83 | 2.989 |
| 345 | 1 | 0 | 2.77 | 2.899 |
| 346 | 1 | 1 | 1.44 | 1.509 |
| 347 | | | 2.89 | 3.042 |
| 348 | 1 | 1 | 1.76 | 1.841 |
| 349 | 0 | 1 | 0.59 | 0.6235 |
| 350 | 1 | 1 | 3.62 | 3.804 |
| 351 | | | 0.67 | 0.707 |
| 352 | 1 | 0 | 2.25 | 2.352 |
| 353 | 1 | 1 | 1.7 | 1.786 |
| 354 | 1 | 1 | 2.36 | 2.463 |
| 355 | 1 | 1 | N/S | N/S |
| 356 | 1 | 1 | 3.36 | 3.549 |
| 357 | 1 | 1 | 1.63 | 1.706 |
| 358 | 0 | 1 | 0.84 | 0.887 |
| 359 | 0 | 1 | 0.5 | 0.5223 |
| 360 | 1 | 1 | 2.44 | 2.568 |
| 361* | 0 | 1 | 1.86 | 1.931 |
| 362* | 0 | 0 | 2.98 | 3.122 |
| 363 | 0 | 0 | 0.072 | 0.0754 |
| 364 | 0 | 1 | 1.64 | 1.739 |
| 365 | 1 | 1 | 3.4 | 3.602 |
| 366 | 1 | 0 | 2.72 | 2.872 |
| 367 | 0 | 1 | 1.12 | 1.205 |
| 368 | 1 | 1 | 3 | 3.207 |
| 369 | 1 | 1 | 1.45 | 1.542 |
| 370 | 1 | 1 | 4.65 | 4.975 |
| 371 | 1 | 1 | 3.1 | 3.271 |
| 372 | 1 | 1 | 1.2 | 1.252 |
| 373 | 1 | 1 | 1.94 | 2.049 |
| 374 | 0 | 0 | 0.24 | 0.2523 |
| 375 | 1 | 1 | 3.4 | 3.528 |
| 376 | 1 | 0 | 2.73 | 2.863 |
| 377 | 0 | 1 | 0.57 | 0.5979 |
| 378 | 1 | 1 | 2.34 | 2.447 |
| 379 | 1 | 1 | 2.9 | 3.073 |
| 380 | 1 | 1 | 2.03 | 2.156 |
| 381 | 1 | 1 | 2.07 | 2.177 |
| 382 | 0 | 1 | 1.23 | 1.301 |
| 383 | 1 | 1 | 2.42 | 2.554 |
| 384 | 1 | 1 | 3.32 | 3.518 |
| 385 | 1 | 1 | 2.18 | 2.293 |
| 386 | 1 | 1 | 1.58 | 1.668 |
| 387 | 0 | 1 | 1.21 | 1.285 |
| 388 | 0 | 0 | 0.074 | 0.0789 |
| 389 | 1 | 1 | 1.65 | 1.725 |
| 390 | 1 | 1 | 2.36 | 2.507 |
| 391 | 1 | 1 | 1.94 | 2.055 |
| 392 | 1 | 1 | 2 | 2.102 |
| 393 | 1 | 1 | 2.61 | 2.705 |
| 394 | 0 | 1 | 1 | 1.06 |
| 395 | 1 | 1 | 2.53 | 2.641 |
| 396 | 1 | 1 | 1.03 | 1.081 |
| 397 | 0 | 0 | 0.136 | 0.1417 |
| 398 | 1 | 1 | 0.99 | 1.033 |
| 399 | 1 | 1 | 1.96 | 2.062 |
| 400 | 0 | 0 | 0.113 | 0.1193 |
| 401 | 1 | 1 | 1.75 | 1.841 |
| 402 | 1 | 1 | 2.34 | 2.442 |
| 403 | 1 | 1 | 1.92 | 2.002 |
| 404 | 1 | 1 | 3.87 | 4.06 |
| 405 | 1 | 1 | 2.94 | 3.068 |
| 406 | 1 | 1 | 1.15 | 1.204 |
| 407 | 1 | 1 | 3.15 | 3.359 |
| 408 | 1 | 1 | 1.83 | 1.923 |
| 409 | 1 | 1 | 2.28 | 2.402 |
| 410 | 1 | 1 | 2.76 | 2.906 |
| 411 | 1 | 1 | 1.88 | 1.994 |
| 412 | 1 | 1 | 1.28 | 1.342 |
| 413 | 1 | 1 | 1.12 | 1.175 |
| 414 | 0 | 1 | 1.28 | 1.341 |
| 415 | 1 | 1 | 2.22 | 2.334 |
| 416 | 0 | 1 | 1.05 | 1.099 |
| 417 | 1 | 1 | 3.01 | 3.148 |
| 418 | 1 | 1 | 3.27 | 3.444 |
| 419 | 1 | 1 | 1.77 | 1.86 |
| 420 | 1 | 1 | 1.44 | 1.497 |
| 421 | 0 | 1 | 0.55 | 0.5777 |
| 422 | 1 | 0 | 2.7 | 2.825 |
| 423 | 1 | 1 | 1.24 | 1.315 |
| 424 | 1 | 1 | 2.95 | 3.106 |
| 425 | 0 | 1 | 0.63 | 0.6607 |
| 426 | 1 | 1 | 2.88 | 3.014 |
| 427 | 1 | 1 | 2.31 | 2.455 |
| 428 | 1 | 0 | 1.92 | 1.994 |
| 429 | 1 | 1 | 3.05 | 3.232 |
| 430 | 1 | 1 | 1.76 | 1.88 |
| 431 | 0 | 0 | 0.11 | 0.1164 |
| 432 | 0 | 1 | 0.78 | 0.8129 |
| 433 | 0 | 1 | 2.01 | 2.134 |
| 434 | 1 | 1 | 1.98 | 2.095 |
| 435 | | | 1.71 | 1.801 |
| 436 | 1 | 0 | 3.27 | 3.447 |
| 437 | 0 | 1 | 0.89 | 0.944 |
| 438 | 1 | 1 | 2.9 | 3.049 |
| 439 | 0 | 0 | 0.18 | 0.1905 |
| 440 | 1 | 1 | 4.12 | 4.367 |
| 441 | 0 | 1 | 1.53 | 1.623 |
| 442 | 1 | 1 | 4.07 | 4.315 |
| 443 | 0 | 1 | 1.35 | 1.429 |
| 444 | 1 | 0 | 2.98 | 3.12 |
| 445 | 1 | 1 | 4.98 | 5.272 |
| 446 | 0 | 1 | 1.22 | 1.288 |
| 447 | 1 | 1 | 4.34 | 4.578 |
| 448 | 1 | 1 | 2.89 | 3.028 |
| 449 | 1 | 1 | 5.8 | 6.135 |
| 450 | 1 | 1 | 4.34 | 4.553 |
| 451 | 1 | 0 | 3.6 | 3.791 |
| 452 | 1 | 1 | 4.67 | 4.947 |
| 453 | 0 | 1 | 1.83 | 1.918 |
| 454 | 1 | 1 | 2.6 | 2.692 |
| 455 | 1 | 1 | 5.03 | 5.301 |
| 456 | 1 | 1 | 4.41 | 4.695 |
| 457 | 1 | 0 | 2.62 | 2.741 |
| 458 | 0 | 0 | 0.133 | 0.1425 |
| 459 | 0 | 1 | 0.53 | 0.5534 |
| 460 | 0 | 1 | 0.63 | 0.6663 |
| 461 | 0 | 1 | 2.78 | 2.943 |
| 462 | 1 | 1 | 2.64 | 2.785 |
| 463 | 0 | 1 | 1.23 | 1.296 |
| 464 | 0 | 1 | 1.55 | 1.629 |
| 465 | 1 | 1 | 2.49 | 2.626 |
| 466 | 1 | 1 | 2.8 | 2.936 |
| 467 | 0 | 0 | 0.19 | 0.2026 |
| 468 | 0 | 1 | 1.91 | 2.029 |
| 469 | 1 | 1 | 1.37 | 1.442 |
| 470 | 0 | 1 | 1.29 | 1.375 |
| 471 | 1 | 1 | 3.74 | 3.919 |
| 472 | 0 | 1 | 1.67 | 1.78 |
| 473 | 1 | 1 | 1.39 | 1.479 |
| 474 | 1 | 1 | 0.88 | 0.926 |
| 475 | | | 2.53 | 2.679 |
| 476 | 1 | 1 | 3.59 | 3.756 |
| 477 | 1 | 1 | 3.96 | 4.196 |
| 478 | 1 | 1 | 1.59 | 1.679 |
| 479 | 0 | 1 | 2.27 | 2.385 |
| 480 | 0 | 0 | 0.108 | 0.1147 |
| 481* | 0 | 1 | 2.21 | 2.363 |
| 482* | 1 | 1 | 0.54 | 0.5726 |
| 483 | 1 | 1 | 1.76 | 1.854 |
| 484 | 1 | 1 | 3.34 | 3.512 |
| 485 | 1 | 1 | 1.4 | 1.468 |
| 486 | 1 | 0 | 0.87 | 0.9085 |
| 487 | 0 | 1 | 0.38 | 0.3976 |
| 488 | 1 | 1 | 2.53 | 2.662 |
| 489 | 0 | 1 | 1.34 | 1.412 |
| 490 | 0 | 1 | 1.17 | 1.246 |
| 491 | 0 | 1 | 0.43 | 0.4505 |
| 492 | 1 | 0 | 3.55 | 3.741 |
| 493 | 0 | 1 | 2.16 | 2.294 |
| 494 | 1 | 1 | 2.6 | 2.736 |
| 495 | 1 | 1 | 2.73 | 2.905 |
| 496 | 1 | 1 | 2.46 | 2.591 |
| 497 | 1 | 1 | 1.8 | 1.906 |
| 498 | 0 | 1 | 0.75 | 0.7913 |
| 499 | 1 | 1 | 1.37 | 1.461 |
| 500 | 1 | 0 | 1.63 | 1.731 |
| 501 | 1 | 1 | 1.34 | 1.417 |
| 502 | 1 | 0 | 0.98 | 1.0156 |
| 503 | 1 | 1 | 0.79 | 0.8276 |
| 504 | 1 | 0 | 1.75 | 1.812 |
| 505 | 1 | 1 | 1.49 | 1.571 |
| 506 | 0 | 0 | 0.084 | 0.0892 |
| 507 | 1 | 1 | 1.2 | 1.247 |
| 508 | 1 | 0 | 1.98 | 2.081 |
| 509 | 1 | 0 | 1.03 | 1.0704 |
| 510 | 1 | 0 | 1.4 | 1.475 |
| 511 | 1 | 0 | 0.76 | 0.791 |
| 512 | 1 | 1 | 1.4 | 1.491 |
| 513 | 1 | 1 | 2.29 | 2.402 |
| 514 | 1 | 1 | 1.14 | 1.19 |
| 515 | 1 | 1 | 1 | 1.044 |
| 516 | 1 | 1 | 1.26 | 1.356 |
| 517 | 0 | 1 | 0.52 | 0.5535 |
| 518 | 1 | 1 | 0.45 | 0.4786 |
| 519 | 1 | 0 | 1.59 | 1.651 |
| 520 | 1 | 1 | 1.59 | 1.667 |
| 521 | 0 | 1 | 0.46 | 0.4803 |
| 522 | 1 | 0 | 1.1 | 1.162 |

TABLE 13
Genetic segregation of an F₂ segregating population ((LA Burley 21 × TN 90 LC) (X))
and average percent total alkaloid and percent nicotine levels in each of the four segregating
genotypes. Both the mean and standard deviation are shown. Three plants with missing
samples are excluded rendering the total number of plants analyzed to be 518.

| | | | | | | Average | |
|---|---|---|---|---|---|---|---|
| | | Number | Number | Average | | Percent | Std Dev |
| | Ratio | of Plants | of Plants | Percent | Std Dev | Total | (Total |
| Genotype | Expected | Expected | Observed | Nicotine | (Nicotine) | Alkaloid | Alkaloid) |
| Nic1 Nic2 | 9/16 | 291.9 | 288 | 2.55 | 1.08 | 2.68 | 1.14 |
| Nic1 nic2 | 3/16 | 97.3 | 96 | 2.25 | 0.83 | 2.36 | 0.87 |
| nic1 Nic2 | 3/16 | 97.3 | 97 | 1.30 | 0.61 | 1.37 | 0.65 |
| nic1 nic2 | 1/16 | 32.4 | 37 | 0.36 | 0.78 | 0.38 | 0.81 |

TABLE 14
A re-analysis of the segregation population in Table 12 further excluding the
four plant pairs which were likely switched (plant Nos: 163 and 164, 174 and 175,
361 and 362, 481 and 482) and rendering the total plant number to be 510.

| | | | | | | Average | |
|---|---|---|---|---|---|---|---|
| | | Number | Number | Average | | Percent | Std Dev |
| | Ratio | of Plants | of Plants | Percent | Std Dev | Total | (Total |
| Genotype | Expected | Expected | Observed | Nicotine | (Nicotine) | Alkaloid | Alkaloid) |
| Nic1 Nic2 | 9/16 | 286.88 | 285 | 2.57 | 1.06 | 2.71 | 1.11 |
| Nic1 nic2 | 3/16 | 95.63 | 96 | 2.25 | 0.83 | 2.36 | 0.87 |
| nic1 Nic2 | 3/16 | 95.63 | 95 | 1.28 | 0.60 | 1.35 | 0.64 |
| nic1 nic2 | 1/16 | 31.88 | 34 | 0.18 | 0.16 | 0.19 | 0.17 |

### Example 12

### Genome Re-Sequencing to Validate and Refine Sequences in the Identified Nic1 Lesion

[0372] Genomic sequences of the identified Nic1 scaffold and annotated genes were re-sequenced using PacBio's SMRT sequencing technology (NT2.0). Sequence quality of Nic1 locus region (NT1.0-Scaffold0002504) was improved. Briefly, base pairs (bps) 1 to 133,550 of NT2.0-Scaffold4274 (SEQ ID No: 73) correspond to and replace NT1.0-Scaffold0002504 between bps 384,701 to 542,313 in the minus orientation. Base pairs 1 to 59,671 of NT2.0-Scaffold14415 (SEQ ID No: 74) correspond to and replace NT1.0-Scaffold0002504 between bps 288,601 to 363,040 in the minus orientation.

[0373] Additional genomic sequence data are provided in SEQ ID Nos: 75 to 82 for the 8 genes previously identified in SEQ ID Nos: 21 to 28, respectively. A new set of cDNA and protein sequences of “g100623_Scaffold0002504” are also identified (new sequences of SEQ ID No: 83 and 84 relative to previous sequences of SEQ ID No: 46 and 66, respectively).

[0374] Each and every U.S. or foreign patent, publication of patent application, non-patent literature or any other reference mentioned in this application is incorporated by reference in its entirety.

### Example 13

### Complete Sequencing of the Nic1 Lesion Region using Bacteria Artificial Chromosome Sequencing

[0375] A bacterial artificial chromosomes (BAC) walking method was used to generate the complete sequence around the Nic1 locus and further identify boundary sequences of the genomic deletion. Briefly, 21 BAC clones associated with whole-genome profiling (WGP) contigs were identified and pooled to form 3 pools of 7 BACs each. Each pool was sequenced separately on separate SMRT cells (PacBio). The sequences were assembled into 14 contigs, which were further assembled into one contig based on overlapping sequence information obtained by blasting 1000 bps on either end of each contig. The resulting reference contig was used to re-map resequencing data from BU21, HI, LI, and LA BU21 lines. A contiguous 425,001 bp region (SEQ ID NO: 85) that spans the entire Nic1 deletion was identified. Table 15 provides details of the fifteen identified gene models with functional information for the encoded proteins based on the best BLAST hit. The relative position of these fifteen genes on SEQ ID NO: 85 can be found in FIG. 7. The genomic sequences (SEQ ID NOs: 86 to 100), coding sequences (CDS; SEQ ID NOs: 101 to 115) and protein sequences (SEQ ID NOs: 116 to 130) are provided for the fifteen Nic1 Deletion Genes (NDG1 to NDG15). Among these, genomic sequence data provided in SEQ ID NOs: 86, 87, and 90 to 100 correspond to the 13 gene models previously identified in SEQ ID NOs: 28, 13, 20, 22, 11, 17, 23, 26, 21, 27, 14, 25, and 24, respectively. RNAi constructs are designed to silence NDG1 to NDG15 and are also used to make transgenic tobacco plants with lower alkaloid levels.

### Example 14

### Development of Additional SNP Markers for Selecting nic1 and nic2

[0376] To provide more efficient selection of plants that harbor nic1 and nic2 mutations, 12 SNPs (6 SNPs for each locus) flanking nic1 and nic2 deletions were identified to develop co-dominant markers. Three SNPs upstream and 3 SNPs downstream of each deletion region are used. Each of the SNP polymorphisms is less than 100 kb from the corresponding deleted region. Table 16 provides more details on the relative location and sequence polymorphism for each SNP, and also provides sequence information for 60 bps upstream and downstream of each SNP. High throughput Kompetetive Allele Specific PCRTM or KASPTM assays (LGC Genomics, Beverly, Mass.) are designed based on the identified SNPs for genotyping. These SNP markers can be used to detect plants that are heterozygous for a nic1 or nic2 deletion and can also distinguish a true homozygous deletion from a bad PCR reaction. The effectiveness of two SNP markers (Seq ID Nos. 135 and 137) for genotyping the F₂ population ((LA Burley 21×TN 90 LC) (X)) of Example 11 (see plant No. 1 to 72 of Table 12) is shown in Table 18.

### Example 15

### Identification of an ERF Gene Associated with nic1

[0377] An ERF gene, named as “ERF-39 like” was identified 307,823 bps downstream of the Nic1 deletion region. Two adjoining SNP markers (SEQ ID Nos. 143 and 144), proximal to the ERF-39 like gene, were identified for genotyping and tracking purposes. The details of the two SNPs are provided in Table 17. The genomic, cDNA, and protein sequence of the ERF-39 like gene are provided in SEQ ID Nos: 145 to 147, respectively. Plants that overexpress or downregulate the ERF-39 gene (e.g., via RNAi, artificial miRNA, chemical mutagenesis, or targeted genome editing) are made and assess the effect of this gene on plant nicotine levels.

### Example 16

### Development of Low-Alkaloid Tobacco Plants via Gene Silencing and Genome Editing

[0378] Tobacco lines with low nicotine while maintaining high leaf quality are produced by introducing loss-of-function or null mutations into Nic1 locus or Nic2 locus via targeted genome editing technologies. Examples of genome editing techniques are Transcription activator-like effector nucleases (TALENs), meganuclease, zinc finger nuclease, and CRISPR, as described in Example 10. Genome modifications are made in commercial tobacco varieties such as TN90, K326 and Narrow Leaf Madole. Additional tobacco lines with suppressed expression of one or more NDGs, one or more ERF genes at Nic2 locus, or a combination thereof are generated via gene silencing (e.g., RNAi, artificial/synthetic microRNA or other small RNA-mediated techniques). Exemplary RNAi cassette sequences targeting NDG1 to NDG15 are listed in Table 15.

[0379] For example, protoplasts are prepared as described in Example 10. One or more entry vectors containing sequences for transcription activator like effector proteins, specific for the target sequences of Nic1 (e.g., NDG1 or NDG2), ERF-39 like, and Nic2 (e.g., ERF189 or another ERF gene from Table 11) are synthesized and transformed into the isolated protoplasts. Protoplasts are cultured into calli. Alternatively, Nic1 and Nic2 loci mutations are achieved through CRISPR and without the use of plasmids. In this case, protoplasts are transformed with Cas9, guide RNA and polyethylene glycol (PEG).

[0380] The plants created contain a gene mutation (e.g., null mutation or deletion) in Nic1 , Nic2, or both loci, and constitute a low-nicotine variety. Alternatively, a variety containing a Nic1 mutant allele is crossed to another variety containing a Nic2 mutant allele. This cross will result in cultivars with desirable genetic backgrounds having an even lower nicotine content but high leaf quality. As an alternate option, gene silencing and genome editing techniques can be utilized as described in Example 10 to introduce Nic1 and Nic2 mutations or deletions at the same time.

### Example 17

### Development of NDG1 or NDG2 silenced tobacco plants via RNAi

[0381] Tobacco plants are produced containing RNAi constructs that target the NDG1 or NDG2 locus. RNAi constructs are created using the exemplary RNAi cassette sequences as described in Example 16 and Table 15. Two constructs are generated to target different regions of the NDG1 locus. A construct named LARi1_c2 (SEQ ID NO: 148) is generated targeting the 5′ region of NDG1. The LARi1_c2 RNAi target sequence corresponds to nucleotide numbers 227 to 1074 according to an annotated NDG1 intron-omitted open reading frame (ORF). The LARi1_c2 target sequence also includes the second and third annotated introns of NDG1, which correspond to positions 2286 to 2368, and positions 2782 to 2842, respectively, on the genomic sequence of NDG1. A second construct named LARi1_c3 (SEQ ID NO: 149) is generated targeting the 3′ region of NDG1. The LARi1_c3 RNAi target sequence corresponds to nucleotide numbers 959 to 1878 according to an annotated NDG1 intron-omitted ORF. The LARi1_c3 target sequence also includes the third annotated intron of NDG1, which corresponds to nucleotide numbers 2782 to 2842 on the genomic sequence of NDG1. A third construct named LARi2 is generated targeting NDG2 (SEQ ID NO:150 and 151).

[0382] Transgenic plants are prepared from TN90 tobacco plants via transformation with either LARi1_c2, LARi1_c3, or LARi2 as described herein. As a control, TN90 tobacco plants are transformed with the empty vector (EV). Transgenic plants are regenerated as described in Examples 8 and 10.

[0383] Gene expression is assayed in transformed plants (T₀) using a multiplex quantitative PCR (qPCR) strategy. Roots are sampled from untopped T₀ plants and untopped TN90 EV control plants at the same growth stage. RNA is extracted from 100 mg of ground, flash frozen tissue using the Qiagen RNeasy plant mini-prep Kit following the manufacturer's instructions (Qiagen, N.V., Velno, The Netherlands). Extracted RNA is DNase-treated using the Ambion TURBO DNA-free Kit following manufacturer's instructions (ThermoFisher Scientific, Waltham, Mass., USA). DNase-treated RNA is converted into cDNA using the Applied Biosystems High Capacity cDNA Reverse Transcription Kit following manufacturer's instructions (ThermoFisher Scientific, Waltham, Mass., USA).

[0384] For qPCR, 5 μl of cDNA is used in a 50 μl reaction. Each sample is run in triplicate using an Applied Biosystems Microamp Optical 96-well Reaction Plate using Taqman® forward and reverse primers and Taqman® probes with either FAM™, VIC™, or JUN dyes in a Taqman® Multiplex master mix (ThermoFisher Scientific, Waltham, Mass., USA). Briefly, a 50 μl multiplex qPCR reaction contains 5 μl of cDNA, 25 μl of Taqman Multiplex MasterMix, 1.0 μl of each 20 μM Forward primer, 1.0 μl of each 20 μM Reverse primer, 0.45 ul of each 12.5 μM probe, and 10.2 μl of ddH2O. The threshold cycle (ΔcT) for all assays is calculated with respect to the control assay (GAPDH) (SEQ ID NOs: 165 to 167). The ΔΔcT method for relative quantification is used to normalize each assay sample with respect to the TN90 EV control.

[0385] The primer pair NDG1_T1RA and its corresponding probe (SEQ ID NOs: 168 to 170) anneal to the LARi1_c2 RNAi target sequence, but are upstream of and do not anneal to the LARi1_c3 RNAi target sequence. The amplicon from NDG1_T1RA1 corresponds to nucleotide numbers 414 to 473 according to the annotated NDG1 ORF. The primer pair NDG1_T1A2 and its corresponding probe (SEQ ID NOs: 171 to 173) anneal to the LARi1_c3 RNAi target sequence, but are downstream of and do not anneal to the LARi1_c2 RNAi target sequence. The amplicon from NDG1-T1A2 corresponds to nucleotide numbers 1131 to 1372 according to the annotated NDG1 ORF. To track expression of PMT1a, the primer pair PMT1a and its corresponding probe (SEQ ID NOs: 174 to 176) are used.

[0386] The expression of PMT1a and NDG1 is assayed for twelve independent LARi1_c2 T₀ lines. Of the twelve lines tested, three showed significant reduction in PMT1a expression (p<0.05, all pairs Student's t test). The LARi₁_c2 1203 line shows significant reduction in both NDG1 (about 46% reduction compared to control, assayed by the NDG1_T1A2 primer pair (p<0.05, all pairs Student's t test)) and PMT1a expression (about 40% reduction of PMT1a expression compared to control). Meanwhile, six independent LARi1_c3 T₀ lines are tested. Among these, three show a significant reduction in PMT1a expression (p<0.05, all pairs Student's t test).

[0387] Field trials are performed for T₂ lines harboring the LARi1 construct and F₂ lines harboring the LARi1 and the LARi2 construct. The F₂ lines are derived from a cross between plants harboring a LARi1 construct and the LARi2 construct. F₁ plants are selfed to produce F₂ seed. All T₂ and F₂ lines are screened for the NPTII gene marker and for the presence of the constructs. Empty vector controls and LI BU21 and LA BU21 are planted for comparison. Each plant is topped at maturity and leaf samples are collected two weeks post topping for alkaloid analysis. Alkaloid analysis is performed as described in Example 3. The percentage of total alkaloids by leaf dry weight and the percentage reduction as compared to the empty vector control is shown in Table 19.

TABLE 15
Details of the location of the coding sequence (CDS) within Nic1 locus, and BLAST hit
with the lowest E-value of the corresponding protein are provided in this Table.

| | | | | | | Amino | | RNAi |
|---|---|---|---|---|---|---|---|---|
| | | | | Genomic | cDNA | acid | Corresponding | cassette |
| | Position coordinates | | | sequence | sequence | sequence | genes from | sequence |
| Name | on SEQ ID NO: 85 | BLAST Hit Description | Blast Hit ID | (SEQ ID) | (SEQ ID) | (SEQ ID) | Table 10 | (SEQ ID) |
| NDG1 | join(385015 . . . 385449, | PREDICTED: putative late | XP_{—}009624787.1 | 86 | 101 | 116 | g100614_Scaf- | 148 and |
| | 387135 . . . 387299, | blight resistance protein | | | | | fold0002504 | 149 |
| | 387383 . . . 387795, | homolog R1A-3 [ [symbol] [symbol] ] | | | | | | |
| | 387857 . . . 389264) | | | | | | | |
| NDG2 | complement(join(73886 | PREDICTED: putative late | XP_{—}009589795.1 | 87 | 102 | 117 | g100631_Scaf- | 150 and |
| | . . . 74311, | blight resistance protein | | | | | fold0002504 | 151 |
| | 74491 . . . 74680, | homolog R1B-16 [ [symbol] [symbol] ] | | | | | | |
| | 74794 . . . 74934, | | | | | | | |
| | 75026 . . . 76149, | | | | | | | |
| | 76285 . . . 76524)) | | | | | | | |
| NDG3 | join(323943 . . . 323949, | PREDICTED: | XP_009594228.1 | 88 | 103 | 118 | | 152 |
| | 324085 . . . 324464) | uncharacterized | | | | | | |
| | | protein LOC104090758 | | | | | | |
| | | [Nicotiana tomentosiformis] | | | | | | |
| NDG4 | 315634 . . . 316095 | PREDICTED: | XP_009613372.1 | 89 | 104 | 119 | | 153 |
| | | uncharacterized | | | | | | |
| | | protein LOC104106516 | | | | | | |
| | | [Nicotiana tomentosiformis] | | | | | | |
| NDG5 | complement(join(179863 | PREDICTED: | XP_009595504.1 | 90 | 105 | 120 | g100618_Scaf- | 154 |
| | . . . 179982, | uncharacterized | | | | | fold0002504 | |
| | 180074 . . . 180152, | protein LOC104091789 | | | | | | |
| | 180839 . . . 181455)) | [Nicotiana tomentosiformis] | | | | | | |
| NDG6 | complement(join(233956 | PREDICTED: | XP_009597352.1 | 91 | 106 | 121 | g100617_Scaf- | 155 |
| | . . . 234093, | uncharacterized | | | | | fold0002504 | |
| | 234729 . . . 235030, | protein LOC104093328 | | | | | | |
| | 235166 . . . 235378, | [Nicotiana tomentosiformis] | | | | | | |
| | 235496 . . . 236068, | | | | | | | |
| | 236374 . . . 236438, | | | | | | | |
| | 236633 . . . 236874)) | | | | | | | |
| NDG7 | join(36266 . . . 36629, | PREDICTED: | XP_015054850.1 | 92 | 107 | 122 | g100619_Scaf- | 156 |
| | 36753 . . . 36911, | uncharacterized | | | | | fold0002504 | |
| | 37083 . . . 37384, | protein LOC107001234 | | | | | | |
| | 37655 . . . 37736, | [Solanum pennellii] | | | | | | |
| | 37857 . . . 38347, | | | | | | | |
| | 39697 . . . 39783) | | | | | | | |
| NDG8 | join(114418 . . . 114612, | PREDICTED: | XP_009589152.1 | 93 | 108 | 123 | g100620_Scaf- | 157 |
| | 115436 . . . 115956, | uncharacterized | | | | | fold0002504 | |
| | 116268 . . . 116427, | protein LOC104086561 | | | | | | |
| | 116558 . . . 116749, | [Nicotiana tomentosiformis] | | | | | | |
| | 116833 . . . 117003) | | | | | | | |
| NDG9 | complement(join(262599 | PREDICTED: | XP_015086886.1 | 94 | 109 | 124 | g100621_Scaf- | 158 |
| | . . . 262791, | uncharacterized | | | | | fold0002504 | |
| | 264178 . . . 264595, | protein LOC107029976 | | | | | | |
| | 264677 . . . 264995)) | [Solanum pennellii] | | | | | | |
| NDG10 | 335270 . . . 336187 | PREDICTED: | XP_009766114.1 | 95 | 110 | 125 | g100623_Scaf- | 159 |
| | | uncharacterized | | | | | fold0002504 | |
| | | protein LOC104217532 | | | | | | |
| | | [Nicotiana sylvestris] | | | | | | |
| NDG11 | complement(join(196787 | PREDICTED: | XP_009615097.1 | 96 | 111 | 126 | g100622_Scaf- | 160 |
| | . . . 197330, | uncharacterized | | | | | fold0002504 | |
| | 197459 . . . 197772, | protein LOC104107887 | | | | | | |
| | 197860 . . . 198026, | [Nicotiana tomentosiformis] | | | | | | |
| | 198131 . . . 198293)) | | | | | | | |
| NDG12 | complement(join(340626 | PREDICTED: | XP_009775660.1 | 97 | 112 | 127 | g100626_Scaf- | 161 |
| | . . . 340850, | uncharacterized | | | | | fold0002504 | |
| | 340943 . . . 341242, | protein LOC104225535 | | | | | | |
| | 341377 . . . 342443, | [Nicotiana sylvestris] | | | | | | |
| | 342827 . . . 342891, | | | | | | | |
| | 345833 . . . 346446, | | | | | | | |
| | 346782 . . . 347228)) | | | | | | | |
| NDG13 | join(79509 . . . 79744, | PREDICTED: | XP_009599950.1 | 98 | 113 | 128 | g100627_Scaf- | 162 |
| | 79863 . . . 80141, | uncharacterized | | | | | fold0002504 | |
| | 80301 . . . 80715) | protein LOC104095512 | | | | | | |
| | | [Nicotiana tomentosiformis] | | | | | | |
| NDG14 | complement(join(297606 | PREDICTED: | XP_009764210.1 | 99 | 114 | 129 | g100628_Scaf- | 163 |
| | . . . 297727, | uncharacterized | | | | | fold0002504 | |
| | 299439 . . . 399551, | protein LOC104215965 | | | | | | |
| | 300249 . . . 300331, | [Nicotiana sylvestris] | | | | | | |
| | 300629 . . . 300802, | | | | | | | |
| | 301088 . . . 301258, | | | | | | | |
| | 301326 . . . 301450, | | | | | | | |
| | 301535 . . . 301636, | | | | | | | |
| | 301731 . . . 301859, | | | | | | | |
| | 301942 . . . 302392)) | | | | | | | |
| NDG15 | join(291110 . . . 391242, | PREDICTED: | XP_009785055.1 | 100 | 115 | 130 | g100632_Scaf- | 164 |
| | 291376 . . . 391556, | DNA ligase 1- | | | | | fold0002504 | |
| | 291665 . . . 292004) | like [Nicotiana sylvestris] | | | | | | |

Sequences of inverted repeat-containing RNAi cassettes are listed as SEQ ID Nos. The T-DNA cassette sequences of the RNAi vector can be found in SEQ ID Nos. 69 and 70.

TABLE 16
SNP markers flanking Nic1 or Nic2 deletion region. REF refers to the
sequence of a reference TN90 allele. ALT refers to an alternative allele
associated with the corresponding deletion region. Genotype in the 4
varieties (BU21, HI, LI, and LA) are shown where “00” refers to homozygous
for the reference TN90 allele while “11” refers to homozygous for the ALT
allele. The polymorphic site in the sequence is denoted by an “X”.

| SEQ | | | | | | | | | |
|---|---|---|---|---|---|---|---|---|---|
| Marker | | Relative | | | | | | | |
| (SEQ | Assc'd | Position to | | | | | | | |
| ID No.) | Locus | the deletion | REF | ALT | BU21 | HI | LI | LA | Sequence |
| 131 | Nic1 | Upstream | C | A | 00 | 00 | 11 | 11 | ATCATGTCTAATTGATTTAATTGCTGTATTTGCTCAAACTGCCTT |
| | | | | | | | | | ATTTGGACTATGTGAXACATGCTAGGTTAGAAATATATGTTTTAA |
| | | | | | | | | | CTTGGTGTGAAATTTAATTTAATTGAGTATT |
| | | | | | | | | | (SEQ ID NO. 131) |
| 132 | Nic1 | Upstream | C | T | 00 | 00 | 11 | 11 | GCGGCTGTATACCATTTTGTACGGACCGCAGTGGGCTCACCGTGG |
| | | | | | | | | | CCTCAATCGAGTTTGXGCGGTTCATAAAGATGGGGGTTCAGAGAG |
| | | | | | | | | | TTGGGAGTTTAGAGATTAAGACCAATACGGT |
| | | | | | | | | | (SEQ ID NO. 132) |
| 133 | Nic1 | Upstream | T | G | 00 | 00 | 11 | 11 | GGAAGCACTCAAGCATCCACTCTTGGAGGTGGTGGGGGAGGGTCT |
| | | | | | | | | | GGAATATTATCATTGXCCTGGTGGCTTCTCCTTTGTCTTTGAGGT |
| | | | | | | | | | ACAATAGGAACCTCATCATCAATATTGTCAT |
| | | | | | | | | | (SEQ ID NO. 133) |
| 134 | Nic1 | Downstream | T | C | 00 | 00 | 11 | 11 | ACGAAGGATAAAGTGTTTGGGTAGCAGAACAAAATGCCTTCGTCA |
| | | | | | | | | | TTCCAGTCTTTAACAXATGCCAAGTGCAAACAATACAATTTAAAT |
| | | | | | | | | | TTGTAGTCTCTTCTGATGGTGTTGGACTTAC |
| | | | | | | | | | (SEQ ID NO. 134) |
| 135 | Nic1 | Downstream | C | T | 00 | 00 | 11 | 11 | ACACCTTCTTCCGGGTTAACAGAATTCCATACTCGGATTTCTGGT |
| | | | | | | | | | TCGCAGACTGTAATAXGGAGTCAATCTTTTCCTCGATTTGGGATT |
| | | | | | | | | | TGAACCGGTGATTTGGGAAATCATAATTATC |
| | | | | | | | | | (SEQ ID NO. 135) |
| 136 | Nic1 | Downstream | A | G | 00 | 00 | 11 | 11 | TAGCTAACAAGGAATTGGATCAATTGAGAGATTGATTAACCCAAT |
| | | | | | | | | | TAAAGAGTTTAACCTXGAGATAGTAACAACATGACTTGAGCTCTT |
| | | | | | | | | | ATCAACAGTTTTGGTTGATACCTTTTGGTCT |
| | | | | | | | | | (SEQ ID NO. 136) |
| 137 | Nic2 | Upstream | T | C | 00 | 11 | 00 | 11 | TTACATAAATATAAAGGTTTAATTGAAAGTTATACTTTTTGGTCA |
| | | | | | | | | | AACACAAATACCGTAXCAAAATAGTTCGATACGGTTAGGTATTTT |
| | | | | | | | | | CTTGTTTGGTTCGGTACGGCTTCGATATTAT |
| | | | | | | | | | (SEQ ID NO. 137) |
| 138 | Nic2 | Upstream | G | A | 00 | 11 | 00 | 11 | GAAAATACCGACCGAAAACGGTCGAAAATAACATATTTTTTAATT |
| | | | | | | | | | ATTCCAACCGACTTCXGTCGGTTTGTTAAGATTTAAAAAGAAATG |
| | | | | | | | | | CAAAATTATCACATAATTATATTTCCGACCG |
| | | | | | | | | | (SEQ ID NO. 138) |
| 139 | Nic2 | Upstream | G | A | 00 | 11 | 00 | 11 | GTCTGCACTTTTCTTATTGCTTATTGTTTACCCGAAAAATGGATA |
| | | | | | | | | | GAGTTGAATTTATACXTAGTTTTAAGGGTATGTGGTATAATTTAA |
| | | | | | | | | | TACAAATCGTAAGAATAAGTAGAAATATCAA |
| | | | | | | | | | (SEQ ID NO: 139) |
| 140 | Nic2 | Downstream | G | A | 00 | 11 | 00 | 11 | TAGGATTTTGACCGTGGTTGGGAACTATGTGAAGACAACTCCGGA |
| | | | | | | | | | ATAGAGTTATGTCGXTTCTGTTAGCTCCATTAGATGATTTTGGAC |
| | | | | | | | | | TTAGGGGCGTGTCCGGATTATGTTTTGGAG |
| | | | | | | | | | (SEQ ID NO: 140) |
| 141 | Nic2 | Downstream | A | G | 00 | 11 | 00 | 11 | GTCCCTTACGAATTTGTCTTCAAATTGATACTTCTCCTTGCTAAA |
| | | | | | | | | | ACACCACGATCCTTAXCCACAACTCACCCCACGAACCCTAGCATA |
| | | | | | | | | | GAACCACAACACCCTACGGCCCTTAAGAAAC |
| | | | | | | | | | (SEQ ID NO: 141) |
| 142 | Nic2 | Downstream | T | C | 00 | 11 | 00 | 11 | GCCTCCCAGCTTAGCAAGAGTTCATCCGGCATTTCATTTTTCGAT |
| | | | | | | | | | GCTACAAAGGTATCAXGGCAATCCGTCTCATGTGTTGGATTTCAG |
| | | | | | | | | | CTCAGTCCAGTTGGACAAGGATCTATCTTAT |
| | | | | | | | | | (SEQ ID NO: 142) |

TABLE 17
SNP markers flanking the ERF-39 like gene which is associated
with Nic1 deletion region. Listed are relative position (Pos,
Upstream/Downstream), Reference allele in TN90 (REF), Alternate
allele (ALT), Genotype in the 4 varieties (BU21, HI, LI and LA BU21),
and sequence of the SNP with flanking position are provided in this
table. “00” refers to the homozygous for the reference TN90 allele while “11”
refers to homozygous for the ALT allele and “01” refers to heterozygous.
The polymorphic site in the sequence is denoted by an “X”

| SNP | | | | | | | | | |
|---|---|---|---|---|---|---|---|---|---|
| Marker | | Relative | | | | | | | |
| (SEQ | Asscd | Position to | | | | | | | |
| ID No.) | Locus | ERF-39 | REF | ALT | BU21 | HI | LI | LA | Sequence |
| 143 | ERF-39 | Upstream | A | G | 00 | 00 | 01 | 01 | CCAAATTATTTTTGACTGTTTGACCAAAATAGCGACCAA |
| | | | | | | | | | CGTTGGTCGCCATTTTTGATCXTTTGACCAAAATGGCGA |
| | | | | | | | | | CCAACTTTGGTCGCTATATTTGAAAATAAATAAATAAAA |
| | | | | | | | | | TAAT |
| | | | | | | | | | (SEQ ID NO: 143) |
| 144 | ERF-39 | Downstream | TG | T | 00 | 00 | 11 | 11 | TTGTTTCTCAAGAAAATCAGCATCGATCTTTTTCTTTAT |
| | | | | | | | | | TATAAAGGTAATATAGATGCTXXGGGTATTAAAAGAGGA |
| | | | | | | | | | CAAAATATTCTGGCATCATTTGAGATTTGCTGAGTGCAA |
| | | | | | | | | | TAACA |
| | | | | | | | | | (SEQ ID NO: 144) |

TABLE 19
Field trials of T₂ LARi1 plants and F₂ LARi2 × LARi1 plants. EV-empty
vector control plants. % alkaloid represents the total alkaloids as a
percent of leaf dry weight. Percentage Reduction is relative to the
empty vector control, a negative number indicates a relative increase.

| | | | | Average |
|---|---|---|---|---|
| | | | Percentage | percent |
| Variety/Pedigree | Generation | % Alkaloid | reduction | alkaloid |
| LA Burley 21 | | 0.304 | 89.114 | 0.398 |
| LA Burley 21 | | 0.334 | | |
| LA Burley 21 | | 0.365 | | |
| LA Burley 21 | | 0.459 | | |
| LA Burley 21 | | 0.527 | | |
| LI Burley 21 | | 1.708 | 44.011 | 2.047 |
| LI Burley 21 | | 2.013 | | |
| LI Burley 21 | | 2.019 | | |
| LI Burley 21 | | 2.124 | | |
| LI Burley 21 | | 2.370 | | |
| LARi1 | T2 | 2.098 | 42.625 | 3.184 |
| LARi1 | T2 | 2.620 | 28.332 | |
| LARi1 | T2 | 2.744 | 24.936 | |
| LARi1 | T2 | 2.960 | 19.032 | |
| LARi1 | T2 | 2.981 | 18.456 | |
| LARi1 | T2 | 2.989 | 18.237 | |
| LARi1 | T2 | 3.084 | 15.652 | |
| LARi1 | T2 | 3.099 | 15.222 | |
| LARi1 | T2 | 3.168 | 13.358 | |
| LARi1 | T2 | 3.200 | 12.478 | |
| LARi1 | T2 | 3.287 | 10.082 | |
| LARi1 | T2 | 3.316 | 9.308 | |
| LARi1 | T2 | 3.362 | 8.045 | |
| LARi1 | T2 | 3.363 | 8.010 | |
| LARi1 | T2 | 3.434 | 6.081 | |
| LARi1 | T2 | 3.492 | 4.473 | |
| LARi1 | T2 | 3.646 | 0.266 | |
| LARi1 | T2 | 3.803 | −4.018 | |
| LARi1 | T2 | 3.855 | −5.447 | |
| LARi1 | T2 | 2.510 | 31.353 | 3.270 |
| LARi1 | T2 | 2.521 | 31.051 | |
| LARi1 | T2 | 2.685 | 26.555 | |
| LARi1 | T2 | 2.753 | 24.686 | |
| LARi1 | T2 | 3.002 | 17.899 | |
| LARi1 | T2 | 3.024 | 17.288 | |
| LARi1 | T2 | 3.027 | 17.190 | |
| LARi1 | T2 | 3.122 | 14.617 | |
| LARi1 | T2 | 3.140 | 14.103 | |
| LARi1 | T2 | 3.152 | 13.783 | |
| LARi1 | T2 | 3.180 | 13.011 | |
| LARi1 | T2 | 3.243 | 11.293 | |
| LARi1 | T2 | 3.281 | 10.244 | |
| LARi1 | T2 | 3.332 | 8.855 | |
| LARi1 | T2 | 3.428 | 6.241 | |
| LARi1 | T2 | 3.546 | 3.008 | |
| LARi1 | T2 | 3.686 | −0.813 | |
| LARi1 | T2 | 3.691 | −0.949 | |
| LARi1 | T2 | 3.915 | −7.096 | |
| LARi1 | T2 | 3.962 | −8.379 | |
| LARi1 | T2 | 4.477 | −22.457 | |
| LARi2 × LARi1 | F2 | 2.443 | 33.171 | 3.312 |
| LARi2 × LARi1 | F2 | 2.503 | 31.540 | |
| LARi2 × LARi1 | F2 | 2.608 | 28.667 | |
| LARi2 × LARi1 | F2 | 2.619 | 28.361 | |
| LARi2 × LARi1 | F2 | 2.674 | 26.853 | |
| LARi2 × LARi1 | F2 | 2.736 | 25.163 | |
| LARi2 × LARi1 | F2 | 2.902 | 20.623 | |
| LARi2 × LARi1 | F2 | 2.958 | 19.090 | |
| LARi2 × LARi1 | F2 | 3.092 | 15.416 | |
| LARi2 × LARi1 | F2 | 3.152 | 13.794 | |
| LARi2 × LARi1 | F2 | 3.163 | 13.480 | |
| LARi2 × LARi1 | F2 | 3.336 | 8.740 | |
| LARi2 × LARi1 | F2 | 3.345 | 8.516 | |
| LARi2 × LARi1 | F2 | 3.400 | 6.990 | |
| LARi2 × LARi1 | F2 | 3.529 | 3.461 | |
| LARi2 × LARi1 | F2 | 3.922 | −7.272 | |
| LARi2 × LARi1 | F2 | 4.002 | −9.476 | |
| LARi2 × LARi1 | F2 | 4.048 | −10.720 | |
| LARi2 × LARi1 | F2 | 4.269 | −16.761 | |
| LARi2 × LARi1 | F2 | 5.539 | −51.520 | |
| LARi2 × LARi1 | F2 | 2.337 | 36.078 | 3.180 |
| LARi2 × LARi1 | F2 | 2.553 | 30.171 | |
| LARi2 × LARi1 | F2 | 2.611 | 28.577 | |
| LARi2 × LARi1 | F2 | 2.635 | 27.931 | |
| LARi2 × LARi1 | F2 | 2.733 | 25.238 | |
| LARi2 × LARi1 | F2 | 2.766 | 24.332 | |
| LARi2 × LARi1 | F2 | 3.065 | 16.169 | |
| LARi2 × LARi1 | F2 | 3.122 | 14.591 | |
| LARi2 × LARi1 | F2 | 3.129 | 14.418 | |
| LARi2 × LARi1 | F2 | 3.146 | 13.944 | |
| LARi2 × LARi1 | F2 | 3.146 | 13.942 | |
| LARi2 × LARi1 | F2 | 3.268 | 10.612 | |
| LARi2 × LARi1 | F2 | 3.290 | 10.021 | |
| LARi2 × LARi1 | F2 | 3.355 | 8.230 | |
| LARi2 × LARi1 | F2 | 3.360 | 8.085 | |
| LARi2 × LARi1 | F2 | 3.423 | 6.366 | |
| LARi2 × LARi1 | F2 | 3.425 | 6.322 | |
| LARi2 × LARi1 | F2 | 3.601 | 1.514 | |
| LARi2 × LARi1 | F2 | 3.611 | 1.233 | |
| LARi2 × LARi1 | F2 | 3.670 | −0.392 | |
| LARi2 × LARi1 | F2 | 3.745 | −2.446 | |
| LARi2 × LARi1 | F2 | 3.966 | −8.494 | |
| t-TN 90 T1502 | | 3.469 | 0.000 | 3.656 |
| (ag-45EV) | | | | |
| t-TN 90 T1502 | | 3.480 | | |
| (ag-45EV) | | | | |
| t-TN 90 T1502 | | 3.604 | | |
| (ag-45EV) | | | | |
| t-TN 90 T1502 | | 4.071 | | |
| (ag-45EV) | | | | |

The application's sequence listing, which the Patent Office published only in electronic form, follows.

SEQUENCE LISTING (176 sequences)

SEQ ID NO: 1 - DNA, 544860 bp, Nicotiana tabacum
  modified_base (508)..(665): a, c, t, g, unknown or other
  misc_feature (508)..(665): n is a, c, g, or t
  modified_base (774)..(1022): a, c, t, g, unknown or other
  misc_feature (774)..(1022): n is a, c, g, or t
  modified_base (1504)..(1710): a, c, t, g, unknown or other
  misc_feature (1504)..(1710): n is a, c, g, or t
  modified_base (2323)..(2605): a, c, t, g, unknown or other
  misc_feature (2323)..(2605): n is a, c, g, or t
  modified_base (2788)..(3952): a, c, t, g, unknown or other
  misc_feature (2788)..(3952): n is a, c, g, or t
  modified_base (4449)..(4733): a, c, t, g, unknown or other
  misc_feature (4449)..(4733): n is a, c, g, or t
  modified_base (6404)..(6636): a, c, t, g, unknown or other
  misc_feature (6404)..(6636): n is a, c, g, or t
  modified_base (6765)..(7184): a, c, t, g, unknown or other
  misc_feature (6765)..(7184): n is a, c, g, or t
  modified_base (7413)..(7736): a, c, t, g, unknown or other
  misc_feature (7413)..(7736): n is a, c, g, or t
  modified_base (8050)..(11807): a, c, t, g, unknown or other
  misc_feature (8050)..(11807): n is a, c, g, or t
  modified_base (14157)..(15925): a, c, t, g, unknown or other
  misc_feature (14157)..(15925): n is a, c, g, or t
  modified_base (16020)..(16319): a, c, t, g, unknown or other
  misc_feature (16020)..(16319): n is a, c, g, or t
  modified_base (19590)..(20795): a, c, t, g, unknown or other
  misc_feature (19590)..(20795): n is a, c, g, or t
  modified_base (68611)..(68644): a, c, t, g, unknown or other
  misc_feature (68611)..(68644): n is a, c, g, or t
  modified_base (88771)..(89748): a, c, t, g, unknown or other
  misc_feature (88771)..(89748): n is a, c, g, or t
  modified_base (94428)..(95530): a, c, t, g, unknown or other
  misc_feature (94428)..(95530): n is a, c, g, or t
  modified_base (96949)..(97002): a, c, t, g, unknown or other
  misc_feature (96949)..(97002): n is a, c, g, or t
  modified_base (97945)..(98909): a, c, t, g, unknown or other
  misc_feature (97945)..(98909): n is a, c, g, or t
  modified_base (101464)..(102314): a, c, t, g, unknown or other
  misc_feature (101464)..(102314): n is a, c, g, or t
  modified_base (103393)..(103743): a, c, t, g, unknown or other
  misc_feature (103393)..(103743): n is a, c, g, or t
  modified_base (105387)..(106289): a, c, t, g, unknown or other
  misc_feature (105387)..(106289): n is a, c, g, or t
  modified_base (108528)..(108951): a, c, t, g, unknown or other
  misc_feature (108528)..(108951): n is a, c, g, or t
  modified_base (109543)..(109603): a, c, t, g, unknown or other
  misc_feature (109543)..(109603): n is a, c, g, or t
  modified_base (110901)..(111323): a, c, t, g, unknown or other
  misc_feature (110901)..(111323): n is a, c, g, or t
  modified_base (112813)..(113267): a, c, t, g, unknown or other
  misc_feature (112813)..(113267): n is a, c, g, or t
  modified_base (115857)..(115922): a, c, t, g, unknown or other
  misc_feature (115857)..(115922): n is a, c, g, or t
  modified_base (116209)..(116310): a, c, t, g, unknown or other
  misc_feature (116209)..(116310): n is a, c, g, or t
  modified_base (117427)..(117479): a, c, t, g, unknown or other
  misc_feature (117427)..(117479): n is a, c, g, or t
  modified_base (119018)..(119094): a, c, t, g, unknown or other
  misc_feature (119018)..(119094): n is a, c, g, or t
  modified_base (120014)..(120128): a, c, t, g, unknown or other
  misc_feature (120014)..(120128): n is a, c, g, or t
  modified_base (121693)..(122657): a, c, t, g, unknown or other
  misc_feature (121693)..(122657): n is a, c, g, or t
  modified_base (132002)..(132825): a, c, t, g, unknown or other
  misc_feature (132002)..(132825): n is a, c, g, or t
  modified_base (133595)..(133774): a, c, t, g, unknown or other
  misc_feature (133595)..(133774): n is a, c, g, or t
  modified_base (137845)..(138347): a, c, t, g, unknown or other
  misc_feature (137845)..(138347): n is a, c, g, or t
  modified_base (139038)..(139117): a, c, t, g, unknown or other
  misc_feature (139038)..(139117): n is a, c, g, or t
  modified_base (149767)..(149850): a, c, t, g, unknown or other
  misc_feature (149767)..(149850): n is a, c, g, or t
  modified_base (151818)..(152000): a, c, t, g, unknown or other
  misc_feature (151818)..(152000): n is a, c, g, or t
  modified_base (154629)..(154687): a, c, t, g, unknown or other
  misc_feature (154629)..(154687): n is a, c, g, or t
  modified_base (164010)..(164826): a, c, t, g, unknown or other
  misc_feature (164010)..(164826): n is a, c, g, or t
  modified_base (165105)..(165134): a, c, t, g, unknown or other
  misc_feature (165105)..(165134): n is a, c, g, or t
  modified_base (165669)..(166416): a, c, t, g, unknown or other
  misc_feature (165669)..(166416): n is a, c, g, or t
  modified_base (169484)..(170438): a, c, t, g, unknown or other
  misc_feature (169484)..(170438): n is a, c, g, or t
  modified_base (182347)..(183449): a, c, t, g, unknown or other
  misc_feature (182347)..(183449): n is a, c, g, or t
  modified_base (193814)..(194946): a, c, t, g, unknown or other
  misc_feature (193814)..(194946): n is a, c, g, or t
  modified_base (197432)..(197915): a, c, t, g, unknown or other
  misc_feature (197432)..(197915): n is a, c, g, or t
  modified_base (198748)..(198845): a, c, t, g, unknown or other
  misc_feature (198748)..(198845): n is a, c, g, or t
  modified_base (199018)..(199233): a, c, t, g, unknown or other
  misc_feature (199018)..(199233): n is a, c, g, or t
  modified_base (201794)..(203047): a, c, t, g, unknown or other
  misc_feature (201794)..(203047): n is a, c, g, or t
  modified_base (204610)..(204717): a, c, t, g, unknown or other
  misc_feature (204610)..(204717): n is a, c, g, or t
  modified_base (205585)..(205642): a, c, t, g, unknown or other
  misc_feature (205585)..(205642): n is a, c, g, or t
  modified_base (211349)..(212585): a, c, t, g, unknown or other
  misc_feature (211349)..(212585): n is a, c, g, or t
  modified_base (216854)..(217196): a, c, t, g, unknown or other
  misc_feature (216854)..(217196): n is a, c, g, or t
  modified_base (218376)..(218438): a, c, t, g, unknown or other
  misc_feature (218376)..(218438): n is a, c, g, or t
  modified_base (219439)..(219576): a, c, t, g, unknown or other
  misc_feature (219439)..(219576): n is a, c, g, or t
  modified_base (220972)..(221047): a, c, t, g, unknown or other
  misc_feature (220972)..(221047): n is a, c, g, or t
  modified_base (222205)..(223290): a, c, t, g, unknown or other
  misc_feature (222205)..(223290): n is a, c, g, or t
  modified_base (228932)..(229903): a, c, t, g, unknown or other
  misc_feature (228932)..(229903): n is a, c, g, or t
  modified_base (230004)..(232230): a, c, t, g, unknown or other
  misc_feature (230004)..(232230): n is a, c, g, or t
  modified_base (234518)..(237200): a, c, t, g, unknown or other
  misc_feature (234518)..(237200): n is a, c, g, or t
  modified_base (238461)..(238515): a, c, t, g, unknown or other
  misc_feature (238461)..(238515): n is a, c, g, or t
  modified_base (238748)..(239016): a, c, t, g, unknown or other
  misc_feature (238748)..(239016): n is a, c, g, or t
  modified_base (239161)..(239550): a, c, t, g, unknown or other
  misc_feature (239161)..(239550): n is a, c, g, or t
  modified_base (239647)..(241873): a, c, t, g, unknown or other
  misc_feature (239647)..(241873): n is a, c, g, or t
  modified_base (241994)..(241994): a, c, t, g, unknown or other
  misc_feature (241994)..(241994): n is a, c, g, or t
  modified_base (242098)..(242427): a, c, t, g, unknown or other
  misc_feature (242098)..(242427): n is a, c, g, or t
  modified_base (243115)..(243587): a, c, t, g, unknown or other
  misc_feature (243115)..(243587): n is a, c, g, or t
  modified_base (243791)..(243931): a, c, t, g, unknown or other
  misc_feature (243791)..(243931): n is a, c, g, or t
  modified_base (244196)..(244386): a, c, t, g, unknown or other
  misc_feature (244196)..(244386): n is a, c, g, or t
  modified_base (244734)..(244734): a, c, t, g, unknown or other
  misc_feature (244734)..(244734): n is a, c, g, or t
  modified_base (245291)..(246331): a, c, t, g, unknown or other
  misc_feature (245291)..(246331): n is a, c, g, or t
  modified_base (261356)..(261470): a, c, t, g, unknown or other
  misc_feature (261356)..(261470): n is a, c, g, or t
  modified_base (261805)..(261881): a, c, t, g, unknown or other
  misc_feature (261805)..(261881): n is a, c, g, or t
  modified_base (262761)..(262827): a, c, t, g, unknown or other
  misc_feature (262761)..(262827): n is a, c, g, or t
  modified_base (274208)..(275208): a, c, t, g, unknown or other
  misc_feature (274208)..(275208): n is a, c, g, or t
  modified_base (276915)..(277615): a, c, t, g, unknown or other
  misc_feature (276915)..(277615): n is a, c, g, or t
  modified_base (279243)..(279618): a, c, t, g, unknown or other
  misc_feature (279243)..(279618): n is a, c, g, or t
  modified_base (280628)..(281578): a, c, t, g, unknown or other
  misc_feature (280628)..(281578): n is a, c, g, or t
  modified_base (287404)..(288600): a, c, t, g, unknown or other
  misc_feature (287404)..(288600): n is a, c, g, or t
  modified_base (290909)..(292327): a, c, t, g, unknown or other
  misc_feature (290909)..(292327): n is a, c, g, or t
  modified_base (294402)..(295585): a, c, t, g, unknown or other
  misc_feature (294402)..(295585): n is a, c, g, or t
  modified_base (298514)..(298581): a, c, t, g, unknown or other
  misc_feature (298514)..(298581): n is a, c, g, or t
  modified_base (299346)..(299610): a, c, t, g, unknown or other
  misc_feature (299346)..(299610): n is a, c, g, or t
  modified_base (301550)..(302780): a, c, t, g, unknown or other
  misc_feature (301550)..(302780): n is a, c, g, or t
  modified_base (308417)..(309059): a, c, t, g, unknown or other
  misc_feature (308417)..(309059): n is a, c, g, or t
  modified_base (310980)..(311332): a, c, t, g, unknown or other
  misc_feature (310980)..(311332): n is a, c, g, or t
  modified_base (312445)..(312598): a, c, t, g, unknown or other
  misc_feature (312445)..(312598): n is a, c, g, or t
  modified_base (314180)..(315423): a, c, t, g, unknown or other
  misc_feature (314180)..(315423): n is a, c, g, or t
  modified_base (321543)..(322781): a, c, t, g, unknown or other
  misc_feature (321543)..(322781): n is a, c, g, or t
  modified_base (327748)..(328908): a, c, t, g, unknown or other
  misc_feature (327748)..(328908): n is a, c, g, or t
  modified_base (333707)..(334801): a, c, t, g, unknown or other
  misc_feature (333707)..(334801): n is a, c, g, or t
  modified_base (338255)..(339081): a, c, t, g, unknown or other
  misc_feature (338255)..(339081): n is a, c, g, or t
  modified_base (339984)..(341017): a, c, t, g, unknown or other
  misc_feature (339984)..(341017): n is a, c, g, or t
  modified_base (344149)..(344523): a, c, t, g, unknown or other
  misc_feature (344149)..(344523): n is a, c, g, or t
  modified_base (344734)..(344873): a, c, t, g, unknown or other
  misc_feature (344734)..(344873): n is a, c, g, or t
  modified_base (346593)..(347724): a, c, t, g, unknown or other
  misc_feature (346593)..(347724): n is a, c, g, or t
  modified_base (355561)..(356719): a, c, t, g, unknown or other
  misc_feature (355561)..(356719): n is a, c, g, or t
  modified_base (358194)..(358614): a, c, t, g, unknown or other
  misc_feature (358194)..(358614): n is a, c, g, or t
  modified_base (366613)..(367695): a, c, t, g, unknown or other
  misc_feature (366613)..(367695): n is a, c, g, or t
  modified_base (371793)..(372851): a, c, t, g, unknown or other
  misc_feature (371793)..(372851): n is a, c, g, or t
  modified_base (377135)..(377651): a, c, t, g, unknown or other
  misc_feature (377135)..(377651): n is a, c, g, or t
  modified_base (377862)..(378553): a, c, t, g, unknown or other
  misc_feature (377862)..(378553): n is a, c, g, or t
  modified_base (381600)..(382511): a, c, t, g, unknown or other
  misc_feature (381600)..(382511): n is a, c, g, or t
  modified_base (384042)..(384393): a, c, t, g, unknown or other
  misc_feature (384042)..(384393): n is a, c, g, or t
  modified_base (395768)..(396876): a, c, t, g, unknown or other
  misc_feature (395768)..(396876): n is a, c, g, or t
  modified_base (399586)..(400615): a, c, t, g, unknown or other
  misc_feature (399586)..(400615): n is a, c, g, or t
  modified_base (401567)..(402709): a, c, t, g, unknown or other
  misc_feature (401567)..(402709): n is a, c, g, or t
  modified_base (405116)..(406246): a, c, t, g, unknown or other
  misc_feature (405116)..(406246): n is a, c, g, or t
  modified_base (409149)..(409797): a, c, t, g, unknown or other
  misc_feature (409149)..(409797): n is a, c, g, or t
  modified_base (411401)..(411589): a, c, t, g, unknown or other
  misc_feature (411401)..(411589): n is a, c, g, or t
  modified_base (412051)..(412160): a, c, t, g, unknown or other
  misc_feature (412051)..(412160): n is a, c, g, or t
  modified_base (414073)..(414312): a, c, t, g, unknown or other
  misc_feature (414073)..(414312): n is a, c, g, or t
  modified_base (414797)..(414885): a, c, t, g, unknown or other
  misc_feature (414797)..(414885): n is a, c, g, or t
  modified_base (415068)..(415289): a, c, t, g, unknown or other
  misc_feature (415068)..(415289): n is a, c, g, or t
  modified_base (418244)..(418467): a, c, t, g, unknown or other
  misc_feature (418244)..(418467): n is a, c, g, or t
  modified_base (418650)..(418723): a, c, t, g, unknown or other
  misc_feature (418650)..(418723): n is a, c, g, or t
  modified_base (418937)..(419148): a, c, t, g, unknown or other
  misc_feature (418937)..(419148): n is a, c, g, or t
  modified_base (419495)..(419668): a, c, t, g, unknown or other
  misc_feature (419495)..(419668): n is a, c, g, or t
  modified_base (420008)..(421110): a, c, t, g, unknown or other
  misc_feature (420008)..(421110): n is a, c, g, or t
  modified_base (432509)..(432891): a, c, t, g, unknown or other
  misc_feature (432509)..(432891): n is a, c, g, or t
  modified_base (432993)..(433066): a, c, t, g, unknown or other
  misc_feature (432993)..(433066): n is a, c, g, or t
  modified_base (436502)..(436952): a, c, t, g, unknown or other
  misc_feature (436502)..(436952): n is a, c, g, or t
  modified_base (437206)..(437580): a, c, t, g, unknown or other
  misc_feature (437206)..(437580): n is a, c, g, or t
  modified_base (440701)..(441893): a, c, t, g, unknown or other
  misc_feature (440701)..(441893): n is a, c, g, or t
  modified_base (443655)..(444784): a, c, t, g, unknown or other
  misc_feature (443655)..(444784): n is a, c, g, or t
  modified_base (457155)..(458243): a, c, t, g, unknown or other
  misc_feature (457155)..(458243): n is a, c, g, or t
  modified_base (460874)..(462043): a, c, t, g, unknown or other
  misc_feature (460874)..(462043): n is a, c, g, or t
  modified_base (464829)..(465614): a, c, t, g, unknown or other
  misc_feature (464829)..(465614): n is a, c, g, or t
  modified_base (483881)..(484645): a, c, t, g, unknown or other
  misc_feature (483881)..(484645): n is a, c, g, or t
  modified_base (486091)..(486184): a, c, t, g, unknown or other
  misc_feature (486091)..(486184): n is a, c, g, or t
  modified_base (488257)..(488334): a, c, t, g, unknown or other
  misc_feature (488257)..(488334): n is a, c, g, or t
  modified_base (488661)..(489517): a, c, t, g, unknown or other
  misc_feature (488661)..(489517): n is a, c, g, or t
  modified_base (494395)..(494941): a, c, t, g, unknown or other
  misc_feature (494395)..(494941): n is a, c, g, or t
  modified_base (495363)..(495432): a, c, t, g, unknown or other
  misc_feature (495363)..(495432): n is a, c, g, or t
  modified_base (496364)..(496399): a, c, t, g, unknown or other
  misc_feature (496364)..(496399): n is a, c, g, or t
  modified_base (500803)..(500897): a, c, t, g, unknown or other
  misc_feature (500803)..(500897): n is a, c, g, or t
  modified_base (503744)..(503859): a, c, t, g, unknown or other
  misc_feature (503744)..(503859): n is a, c, g, or t
  modified_base (505824)..(506859): a, c, t, g, unknown or other
  misc_feature (505824)..(506859): n is a, c, g, or t
  modified_base (509081)..(510327): a, c, t, g, unknown or other
  misc_feature (509081)..(510327): n is a, c, g, or t
  modified_base (514371)..(515119): a, c, t, g, unknown or other
  misc_feature (514371)..(515119): n is a, c, g, or t
  modified_base (517650)..(518789): a, c, t, g, unknown or other
  misc_feature (517650)..(518789): n is a, c, g, or t
  modified_base (522430)..(522898): a, c, t, g, unknown or other
  misc_feature (522430)..(522898): n is a, c, g, or t
  modified_base (523198)..(523265): a, c, t, g, unknown or other
  misc_feature (523198)..(523265): n is a, c, g, or t
  modified_base (525100)..(525164): a, c, t, g, unknown or other
  misc_feature (525100)..(525164): n is a, c, g, or t
  modified_base (525344)..(525422): a, c, t, g, unknown or other
  misc_feature (525344)..(525422): n is a, c, g, or t
  modified_base (525886)..(525952): a, c, t, g, unknown or other
  misc_feature (525886)..(525952): n is a, c, g, or t
  modified_base (527049)..(528417): a, c, t, g, unknown or other
  misc_feature (527049)..(528417): n is a, c, g, or t
  modified_base (531439)..(532580): a, c, t, g, unknown or other
  misc_feature (531439)..(532580): n is a, c, g, or t
  modified_base (540671)..(541760): a, c, t, g, unknown or other
  misc_feature (540671)..(541760): n is a, c, g, or t
ttgggtctgtctagggctagcaacctgaaatgaaaaagaccatcttgatgcatcctatgtgctacatgttgcattccttcaagggtaaaagtgtcatttggcggaccaatgataattgagagtgaatgaaaaggaaaaaaaaagagggtgaagtgcgaagataaagcaaatagggcccggttatgttttgttacatttttatttaaaaaaaacaaatttaaaaaaaaatgaaaattttttaaaaaaaaattctttgcactttttatcatttttgaaaaatcaaaaataaaaaaaagggaaaagaaaatccaaaagattttacatgtttcatcaccttttaagaaaaagcaaaagaaaaaaaagatatgttttctctgaattagttatttttttaatttctcacccgtatccaatcggcccgaactacgtgggtttgattctcaccggatgtgagatacgtaggcaaccctcatcgggtccaaccccaccttttgctaaaatagccaannnnnnnnnnnnnnnnnnnnnnnnnnnnnnnnnnnnnnnnnnnnnnnnnnnnnnnnnnnnnnnnnnnnnnnnnnnnnnnnnnnnnnnnnnnnnnnnnnnnnnnnnnnnnnnnnnnnnnnnnnnnnnnnnnnnnnnnnnnnnnnnnnnnnnnnnnnnnntagccaaaaaaaataaaatatgtcaaattttaattttgtcataaagaagtcgggtgacgctgttttatcaagacatagccgaatgttcccgaaggggacgccggaaggnnnnnnnnnnnnnnnnnnnnnnnnnnnnnnnnnnnnnnnnnnnnnnnnnnnnnnnnnnnnnnnnnnnnnnnnnnnnnnnnnnnnnnnnnnnnnnnnnnnnnnnnnnnnnnnnnnnnnnnnnnnnnnnnnnnnnnnnnnnnnnnnnnnnnnnnnnnnnnnnnnnnnnnnnnnnnnnnnnnnnnnnnnnnnnnnnnnnnnnnnnnnnnnnnnnnnnnnnnnnnnnnnnnnnnnnnnnnnnnnnnnnnnnnnccccgaagcgttgaaaggtcgtgtttgcaacaccaggtttttattgtaatttgaaaaaaaaacaaaaaaaaaacaaagagtgagcggtcaggtatttttagtcaaaaataagccaagccagcttcgaccgcgtcttaaaccgttcttgccgaaatagccttagagtatctttcagtcgttgaaaggctattttcgtaaaagaatgagaagtttgtaaagtgtcataaaataatcctccccggcctcaaaattcatatgaaattgggaaggggccacatttgagaaataaccgtttggttgtctttgccaaacgggaaaagaagctggtcgtttgtttttggagtttgtaaatcttttaattagaatatgtgggttgtttgatttttgagtttgtaggtcatcttcaaacctttgaaacccagttttgtttaatatgaaaattgaaaaaaaatgattagtattgtttatcttttattggtccnnnnnnnnnnnnnnnnnnnnnnnnnnnnnnnnnnnnnnnnnnnnnnnnnnnnnnnnnnnnnnnnnnnnnnnnnnnnnnnnnnnnnnnnnnnnnnnnnnnnnnnnnnnnnnnnnnnnnnnnnnnnnnnnnnnnnnnnnnnnnnnnnnnnnnnnnnnnnnnnnnnnnnnnnnnnnnnnnnnnnnnnnnnnnnnnnnnnnnnnnnnnnnntgacaaaaaaaatatgaaaaaatttttgaagaaaaaaatcaaaaaaaaaatcaaaaaaaaaatcgaaaaaagaagaaaaatgaaaaaaaagggaagagtgttgttaataatgaggaccgactgagtccattctaacctgttttgctttgaatcacaaagaaagttaggtggttggtttgtggtaagccggaaatacaagacccagaagcacactttgcggggatcaggccttataacagaagcactcgaatcctattgggacttgttgactaaggttgatgatatcgaagttggaaatggtctggacaatactgatgcaaaactcagtggctaaagatgtcaattttgataaagtgggaggacactccgttccttggttagcaaaagagaagctggtggtggcttattttgttgtcatttctgttgtccggattattcttcgggttgtaatccgaatatggtcttgtgtcaaaccttcttatctttccattttgtcatatcagtttgtttaagttttgtctaggctattttaggattttattctggtttgttttgtttgttttattattcaaaccatttcgccggtagtctaaaacaaaagccggtctttatnnnnnnnnnnnnnnnnnnnnnnnnnnnnnnnnnnnnnnnnnnnnnnnnnnnnnnnnnnnnnnnnnnnnnnnnnnnnnnnnnnnnnnnnnnnnnnnnnnnnnnnnnnnnnnnnnnnnnnnnnnnnnnnnnnnnnnnnnnnnnnnnnnnnnnnnnnnnnnnnnnnnnnnnnnnnnnnnnnnnnnnnnnnnnnnnnnnnnnnnnnnnnnnnnnnnnnnnnnnnnnnnnnnnnnnnnnnnnnnnnnnnnnnnnnnnnnnnnnnnnnnnnnnnnnnnnnnnnnnnnnntgttaatcataaaaccctgggaagatgatcaaagcatttaaaggaaataagaacggtttgagattgtttgaagcccgagtcatgtgaaaccggggcaagtaaaacataaagaaaaccgttaaatgcaagattcgccaaattagcatgagggtcgttcatgagagtgagagtgtcgcccagcannnnnnnnnnnnnnnnnnnnnnnnnnnnnnnnnnnnnnnnnnnnnnnnnnnnnnnnnnnnnnnnnnnnnnnnnnnnnnnnnnnnnnnnnnnnnnnnnnnnnnnnnnnnnnnnnnnnnnnnnnnnnnnnnnnnnnnnnnnnnnnnnnnnnnnnnnnnnnnnnnnnnnnnnnnnnnnnnnnnnnnnnnnnnnnnnnnnnnnnnnnnnnnnnnnnnnnnnnnnnnnnnnnnnnnnnnnnnnnnnnnnnnnnnnnnnnnnnnnnnnnnnnnnnnnnnnnnnnnnnnnnnnnnnnnnnnnnnnnnnnnnnnnnnnnnnnnnnnnnnnnnnnnnnnnnnnnnnnnnnnnnnnnnnnnnnnnnnnnnnnnnnnnnnnnnnnnnnnnnnnnnnnnnnnnnnnnnnnnnnnnnnnnnnnnnnnnnnnnnnnnnnnnnnnnnnnnnnnnnnnnnnnnnnnnnnnnnnnnnnnnnnnnnnnnnnnnnnnnnnnnnnnnnnnnnnnnnnnnnnnnnnnnnnnnnnnnnnnnnnnnnnnnnnnnnnnnnnnnnnnnnnnnnnnnnnnnnnnnnnnnnnnnnnnnnnnnnnnnnnnnnnnnnnnnnnnnnnnnnnnnnnnnnnnnnnnnnnnnnnnnnnnnnnnnnnnnnnnnnnnnnnnnnnnnnnnnnnnnnnnnnnnnnnnnnnnnnnnnnnnnnnnnnnnnnnnnnnnnnnnnnnnnnnnnnnnnnnnnnnnnnnnnnnnnnnnnnnnnnnnnnnnnnnnnnnnnnnnnnnnnnnnnnnnnnnnnnnnnnnnnnnnnnnnnnnnnnnnnnnnnnnnnnnnnnnnnnnnnnnnnnnnnnnnnnnnnnnnnnnnnnnnnnnnnnnnnnnnnnnnnnnnnnnnnnnnnnnnnnnnnnnnnnnnnnnnnnnnnnnnnnnnnnnnnnnnnnnnnnnnnnnnnnnnnnnnnnnnnnnnnnnnnnnnnnnnnnnnnnnnnnnnnnnnnnnnnnnnnnnnnnnnnnnnnnnnnnnnnnnnnnnnnnnnnnnnnnnnnnnnnnnnnnnnnnnnnnnnnnnnnnnnnnnnnnnnnnnnnnnnnnnnnnnnnnnnnnnnnnnnnnnnnnnnnnnnnnnnnnnnnnnnnnnnnnnnnnnnnnnnnnnnnnnnnnnnnnnnnnnnnnnnnnnnnnnnnnnnnnnnnnnccggaatcaatagcaacgactaggaaatacgagcctggaaggtaaagaaaaaaaaatcaaaaaaaaaattgataacaaaaaaaaaacaaaggaaagtcaaatgaaaacagaggaattgggaactacgtttgacctgattcctcaaagaggatacgtaggcttttcacggctcggtcatagttttgaaaaatgaaaaatcaattaaaatatccctaagcaagaaactgggacaaaggttgcaaataaatctagtttccgaaagttgtaattttgaacccagaatttattttgtatttttgagccttttataccctttctttctagccctatccaaaaacctacattacggtccaaagaaagaccttctgatcagttttcaaaagatgctaagttagacaaacgagagtcttaccggcgaacataacattctgttccacagcagaaaggactctaatctccagcagagagggtcataccggcaacactccaaatccccnnnnnnnnnnnnnnnnnnnnnnnnnnnnnnnnnnnnnnnnnnnnnnnnnnnnnnnnnnnnnnnnnnnnnnnnnnnnnnnnnnnnnnnnnnnnnnnnnnnnnnnnnnnnnnnnnnnnnnnnnnnnnnnnnnnnnnnnnnnnnnnnnnnnnnnnnnnnnnnnnnnnnnnnnnnnnnnnnnnnnnnnnnnnnnnnnnnnnnnnnnnnnnnnnnnnnnnnnnnnnnnnnnnnnnnnnnnnnnnnnnnnnnnnnnnnnnnnnnnnnnnnnnnnnnnnnnnnnnnnnnnnnctgacagcagaggataggccacatgtgcatgtcatgaccattagagtcggtatctgcgtttgataggtttttatttaaagtttcttttgttaaagagtcatcgttttcctttgtcttttattctgttccttttatctttttcctttcatagaaaaattccccagtagagcctgtttggtcaaaaccagtgggaaatgacttcaaaatgggccatcaactctccaatcatgcaagatgagatctgactagtacatccaagtggtatagtcagcaaggaacaagcgcgaggccagtgtcaaaaaaaaaatatccccagcaaaagggagttgacaaaaggattgacgagtgtcaagaaggatatcccagccgaaatcaaaggttgttaaacctcaagaccaaggcctgtggacaaagcaaggagagcagtgagcatgatttgggaaattcatacgatactaaaagatcggtgaagtgcaagtttccaggctatgtaacaaaagaaagggattatccccagcaaataatatcatccccaacaagttgtggaacaaagagcaaggaaggagaaagggaaaaccagcccaacaggagtatcacaaccaaccaccgcgttttgaactaacaaattttgtttgatttgaaacaggtaaaggaaatggcattgatgacaaaaatgcatgccacaagggatgttgtcaaactggggcagaaaattttcttttcatttagaaaattttctggaagtcaggtacccattcggggaagaataaagataatgccagtctcaagggaagtggtcttagaaccagtgttgcccccaacataataagtttcaatggaggaagttgttccccagcaaagggatgaaacttgagctcagaaaaagcaagaggccagcatcattcccaacagcctttcgaagagtgaagcactagttctgaaggaatcaaaatcccccagcggtgttatcctcgacagtgttatccccagctgataatattttaccccccaacaggtaagtaaataattccccaacagtgttatccccagcagtttcgaggagtccaacacaagtttgatgaaagtcggtatcctcagcggttcctttcggggaaagacaaaacgagtcttaagggaggtagtcttcgaaggaagaagctatgcaaaaaaaaaaagagaataaaaaaaaaagtttcgggcaacctagagtgggtaagtaaaaaaagggggaaaagtcatccccatcaaaataatccccagcagtttcgagggaagacaacacatgtaagtaaataattccccaacagtgttatccccagcagtttcgagggaagacaacacatgtaagtaaataattcaggaagaaggaaatggttcacgcataggaaatgcatttcctcctaagtttattttttttacccataggagatgcatttcctcctaaagtttagttttacccataggagatgcatttcctcctaagtttatttttacgcataggaaatgcatttcctcctaagtttagcttcattcataggagatgcatttcctcctaagtttaatttcacccataggagaggcatttcctcctaagtttgtttttacccataggagatgcatttcctcctaagtttagttttacccataggagatgcatttcctcctaagttnnnnnnnnnnnnnnnnnnnnnnnnnnnnnnnnnnnnnnnnnnnnnnnnnnnnnnnnnnnnnnnnnnnnnnnnnnnnnnnnnnnnnnnnnnnnnnnnnnnnnnnnnnnnnnnnnnnnnnnnnnnnnnnnnnnnnnnnnnnnnnnnnnnnnnnnnnnnnnnnnnnnnnnnnnnnnnnnnnnnnnnnnnnnnnnnnnnnnnnnnnnnnnnnnnnnnnnnnnnnnnnnnnnnnnnnnttcctcctaagtttaattttacctctaggagatgcacttcctcctaagtttgtttttacccataggagaggcatttcctcctaagtttgtttttacccataggagatgcatttcctcctaagtttagtnnnnnnnnnnnnnnnnnnnnnnnnnnnnnnnnnnnnnnnnnnnnnnnnnnnnnnnnnnnnnnnnnnnnnnnnnnnnnnnnnnnnnnnnnnnnnnnnnnnnnnnnnnnnnnnnnnnnnnnnnnnnnnnnnnnnnnnnnnnnnnnnnnnnnnnnnnnnnnnnnnnnnnnnnnnnnnnnnnnnnnnnnnnnnnnnnnnnnnnnnnnnnnnnnnnnnnnnnnnnnnnnnnnnnnnnnnnnnnnnnnnnnnnnnnnnnnnnnnnnnnnnnnnnnnnnnnnnnnnnnnnnnnnnnnnnnnnnnnnnnnnnnnnnnnnnnnnnnnnnnnnnnnnnnnnnnnnnnnnnnnnnnnnnnnnnnnnnnnnnnnnnnnnnnnnnnnnnnnnnnnnnnnnnnnnnnnnnnnnnnnnnnnnnnnnnnnnnnnnnctataggagagacatttcctcctaagtttgtttttacccataggagatttcctcttaagtttgtttcacccattggagaggcatttcctcctaagtttagtttcatttataggagatgcatttcctcctaagtttagttttacccataggagaggcatttcctcctaagttgttgttgaaatcaggagtccgcctggagaatagagacattcaattttcaatttagcannnnnnnnnnnnnnnnnnnnnnnnnnnnnnnnnnnnnnnnnnnnnnnnnnnnnnnnnnnnnnnnnnnnnnnnnnnnnnnnnnnnnnnnnnnnnnnnnnnnnnnnnnnnnnnnnnnnnnnnnnnnnnnnnnnnnnnnnnnnnnnnnnnnnnnnnnnnnnnnnnnnnnnnnnnnnnnnnnnnnnnnnnnnnnnnnnnnnnnnnnnnnnnnnnnnnnnnnnnnnnnnnnnnnnnnnnnnnnnnnnnnnnnnnnnnnnnnnnnnnnnnnnnnnnnnnnnnnnnnnnnnnnnnnnnnnnnnnnnnnnnnnnnnnnnnnnnnnnnnnnnncctgaataacagaatggcgatttattggttgaagttgggagcccgcccgtataacagaggaatacattcagcattaattttcaagtattgaagttgggagcccacccatataatagaggaatacatttcagtctttaattttcaaacattgaagttgggagcccgcccagataacagaggcatacatttcagtctttatatttcaagcattgaagttggaaacccgcccagataacagaggcatacatttcagtctttacatttcaagcattgaagttgggagcccgcccatagaacagaggcatacatttcannnnnnnnnnnnnnnnnnnnnnnnnnnnnnnnnnnnnnnnnnnnnnnnnnnnnnnnnnnnnnnnnnnnnnnnnnnnnnnnnnnnnnnnnnnnnnnnnnnnnnnnnnnnnnnnnnnnnnnnnnnnnnnnnnnnnnnnnnnnnnnnnnnnnnnnnnnnnnnnnnnnnnnnnnnnnnnnnnnnnnnnnnnnnnnnnnnnnnnnnnnnnnnnnnnnnnnnnnnnnnnnnnnnnnnnnnnnnnnnnnnnnnnnnnnnnnnnnnnnnnnnnnnnnnnnnnnnnnnnnnnnnnnnnnnnnnnnnnnnnnnnnnnnnnnnnnnnnnnnnnnnnnnnnnnnnnnnnnnnnnnnnnnnnnnnnnnnnnnnnnnnnnnnnnnnnnnnnnnnnnnnnnnnnnnnnnnnnnnnnnnnnnnnnnnnnnnnnnnnnnnnnnnnnnnnnnnnnnnnnnnnnnnnnnnnnnnnnnnnnnnnnnnnnnnnnnnnnnnnnnnnnnnnnnnnnnnnnnnnnnnnnnnnnnnnnnnnnnnnnnnnnnnnnnnnnnnnnnnnnnnnnnnnnnnnnnnnnnnnnnnnnnnnnnnnnnnnnnnnnnnnnnnnnnnnnnnnnnnnnnnnnnnnnnnnnnnnnnnnnnnnnnnnnnnnnnnnnnnnnnnnnnnnnnnnnnnnnnnnnnnnnnnnnnnnnnnnnnnnnnnnnnnnnnnnnnnnnnnnnnnnnnnnnnnnnnnnnnnnnnnnnnnnnnnnnnnnnnnnnnnnnnnnnnnnnnnnnnnnnnnnnnnnnnnnnnnnnnnnnnnnnnnnnnnnnnnnnnnnnnnnnnnnnnnnnnnnnnnnnnnnnnnnnnnnnnnnnnnnnnnnnnnnnnnnnnnnnnnnnnnnnnnnnnnnnnnnnnnnnnnnnnnnnnnnnnnnnnnnnnnnnnnnnnnnnnnnnnnnnnnnnnnnnnnnnnnnnnnnnnnnnnnnnnnnnnnnnnnnnnnnnnnnnnnnnnnnnnnnnnnnnnnnnnnnnnnnnnnnnnnnnnnnnnnnnnnnnnnnnnnnnnnnnnnnnnnnnnnnnnnnnnnnnnnnnnnnnnnnnnnnnnnnnnnnnnnnnnnnnnnnnnnnnnnnnnnnnnnnnnnnnnnnnnnnnnnnnnnnnnnnnnnnnnnnnnnnnnnnnnnnnnnnnnnnnnnnnnnnnnnnnnnnnnnnnnnnnnnnnnnnnnnnnnnnnnnnnnnnnnnnnnnnnnnnnnnnnnnnnnnnnnnnnnnnnnnnnnnnnnnnnnnnnnnnnnnnnnnnnnnnnnnnnnnnnnnnnnnnnnnnnnnnnnnnnnnnnnnnnnnnnnnnnnnnnnnnnnnnnnnnnnnnnnnnnnnnnnnnnnnnnnnnnnnnnnnnnnnnnnnnnnnnnnnnnnnnnnnnnnnnnnnnnnnnnnnnnnnnnnnnnnnnnnnnnnnnnnnnnnnnnnnnnnnnnnnnnnnnnnnnnnnnnnnnnnnnnnnnnnnnnnnnnnnnnnnnnnnnnnnnnnnnnnnnnnnnnnnnnnnnnnnnnnnnnnnnnnnnnnnnnnnnnnnnnnnnnnnnnnnnnnnnnnnnnnnnnnnnnnnnnnnnnnnnnnnnnnnnnnnnnnnnnnnnnnnnnnnnnnnnnnnnnnnnnnnnnnnnnnnnnnnnnnnnnnnnnnnnnnnnnnnnnnnnnnnnnnnnnnnnnnnnnnnnnnnnnnnnnnnnnnnnnnnnnnnnnnnnnnnnnnnnnnnnnnnnnnnnnnnnnnnnnnnnnnnnnnnnnnnnnnnnnnnnnnnnnnnnnnnnnnnnnnnnnnnnnnnnnnnnnnnnnnnnnnnnnnnnnnnnnnnnnnnnnnnnnnnnnnnnnnnnnnnnnnnnnnnnnnnnnnnnnnnnnnnnnnnnnnnnnnnnnnnnnnnnnnnnnnnnnnnnnnnnnnnnnnnnnnnnnnnnnnnnnnnnnnnnnnnnnnnnnnnnnnnnnnnnnnnnnnnnnnnnnnnnnnnnnnnnnnnnnnnnnnnnnnnnnnnnnnnnnnnnnnnnnnnnnnnnnnnnnnnnnnnnnnnnnnnnnnnnnnnnnnnnnnnnnnnnnnnnnnnnnnnnnnnnnnnnnnnnnnnnnnnnnnnnnnnnnnnnnnnnnnnnnnnnnnnnnnnnnnnnnnnnnnnnnnnnnnnnnnnnnnnnnnnnnnnnnnnnnnnnnnnnnnnnnnnnnnnnnnnnnnnnnnnnnnnnnnnnnnnnnnnnnnnnnnnnnnnnnnnnnnnnnnnnnnnnnnnnnnnnnnnnnnnnnnnnnnnnnnnnnnnnnnnnnnnnnnnnnnnnnnnnnnnnnnnnnnnnnnnnnnnnnnnnnnnnnnnnnnnnnnnnnnnnnnnnnnnnnnnnnnnnnnnnnnnnnnnnnnnnnnnnnnnnnnnnnnnnnnnnnnnnnnnnnnnnnnnnnnnnnnnnnnnnnnnnnnnnnnnnnnnnnnnnnnnnnnnnnnnnnnnnnnnnnnnnnnnnnnnnnnnnnnnnnnnnnnnnnnnnnnnnnnnnnnnnnnnnnnnnnnnnnnnnnnnnnnnnnnnnnnnnnnnnnnnnnnnnnnnnnnnnnnnnnnnnnnnnnnnnnnnnnnnnnnnnnnnnnnnnnnnnnnnnnnnnnnnnnnnnnnnnnnnnnnnnnnnnnnnnnnnnnnnnnnnnnnnnnnnnnnnnnnnnnnnnnnnnnnnnnnnnnnnnnnnnnnnnnnnnnnnnnnnnnnnnnnnnnnnnnnnnnnnnnnnnnnnnnnnnnnnnnnnnnnnnnnnnnnnnnnnnnnnnnnnnnnnnnnnnnnnnnnnnnnnnnnnnnnnnnnnnnnnnnnnnnnnnnnnnnnnnnnnnnnnnnnnnnnnnnnnnnnnnnnnnnnnnnnnnnnnnnnnnnnnnnnnnnnnnnnnnnnnnnnnnnnnnnnnnnnnnnnnnnnnnnnnnnnnnnnnnnnnnnnnnnnnnnnnnnnnnnnnnnnnnnnnnnnnnnnnnnnnnnnnnnnnnnnnnnnnnnnnnnnnnnnnnnnnnnnnnnnnnnnnnnnnnnnnnnnnnnnnnnnnnnnnnnnnnnnnnnnnnnnnnnnnnnnnnnnnnnnnnnnnnnnnnnnnnnnnnnnnnnnnnnnnnnnnnnnnnnnnnnnnnnnnnnnnnnnnnnnnnnnnnnnnnnnnnnnnnnnnnnnnnnnnnnnnnnnnnnnnnnnnnnnnnnnnnnnnnnnnnnnnnnnnnnnnnnnnnnnnnnnnnnnnnnnnnnnnnnnnnnnnnnnnnnnnnnnnnnnnnnnnnnnnnnnnnnnnnnnnnnnnnnnnnnnnnnnnnnnnnnnnnnnnnnnnnnnnnnnnnnnnnnnnnnnnnnnnnnnnnnnnnnnnnnnnnnnnnnnnnnnnnnnnnnnnnnnnnnnnnnnnnnnnnnnnnnnnnnnnnnnnnnnnnnnnnnnnnnnnnnnnnnnnnnnnnnnnnnnnnnnnnnnnnnnnnnnnnnnnnnnnnnnnnnnnnnnnnnnnnnnnnnnnnnnnnnnnnnnnnnnnnnnnnnnnnnnnnnnnnnnnnnnnnnnnnnnnnnnnnnnnnnnnnnnnnnnnnnnnnnnnnnnnnnnnnnnnnnnnnnnnnnnnnnnnnnnnnnnnnnnnnnnnnnnnnnnnnnnnnnnnnnnnnnnnnnnnnnnnnnnnnnnnnnnnnnnnnnnnnnnnnnnnnnnnnnnnnnnnnnnnnnnnnnnnnnnnnnnnnnnnnnnnnnnnnnnnnnnnnnnnnnnnnnnnnnnnnnnnnnnnnnnnnnnnnnnnnnnnnnnnnnnnnnnnnnnnnnnnnnnnnnnnnnnnnnnnnnnaggtcgacccagtccagtaccaataacccaactccccctcttcatttttcatttttatttttaaaaaacaaaaacaaaaaaacaaaaaaatgaagaaaaccctaaaaaactaagaaaccatccccccctatttttgcttcttcttctccaaaataccaaacaccccaagcatccatggcagcccttctgcctccccatcgacaacacacacacacacatcaaacacacacaagctccaccaccctcgcatccaaatagaccccgtcgcgtttgccttcatcgtcttcgtcgagctcaagcttgagctcgacatccatggtcgcctctgctgcttcgtcgtctttcttcggcaccaacaaaaacgtcaagctgcgtcagcttcaaaggactgcttaaaatagtccatcgccgagttcatatgctgtcatggctgatgcctcgccgtgcctcggctccttcatcgtcttctgcttcacctcctatgctgccgcgtccagcttcgacgagcagccatggctgctccaaacggatgttgctgctactgttttagtcttcttcctcatcgacgaccttagttgttgaacacagcagcatgtcgatgaccatagttgcttcagctgcgtcgaccactgccttcctgcgaccactcgtttccatggctgaaaacaggagaacaccctcgccatggccggtcgctactgctgctcacgcagctgctacagcgtcagccttctgctccgcctcccagctgcttttgttttgttccctgctgccagcacccttaagttggcgttgcttcagtttgcttcttagattcgttcgtcgtcgtttggtcgagcttttgtcgaggtttgtcgaaatagtccgtacatattcgtttcaatccggtgagtatattttgagttttattttgtccgtatttttgttttgacattttcgaatctaaaatcggcaaatgtttgttttgttcaagtccatcgtttgaattatatttttagtttgttcatgtgctttgttaaattaatttttcagatttcaaatgaaagattaattaattgtttttcatgttatttcatgtttgtaggtaatttgttagtttaatgtttgatagattcaaattgaaatttaattaattatttcttcaatttgtttcatgttatatattttccagaaattattaatgttgtttgagtcatttaatccgtcatgtttgttgttttaaaaaaatggattcattcgtgttcatactttgtttggttgatctagaatccgaaatttgtatagtttgatttcttgtttatcatttatgattatttcttgaatttgtctcataatcttgtttaagtttaatataggaattgttggttgtaatgttgttagagttgattttaagttcaatattattgaattaagaaatctaaatatacttgtttgttgttattattgttgaatctgaaaataggttgtttgttgctaaaaaaaaatattgttcaatcaaattttagttgttctttgttgttcaatttgtgttcatgtgatttgttgttgaaatgttgaagaaatcatgttcatgtgatttgttgtttaaatttctgtagaaattggtcatattggctatattttggttgagtgtgattaattgatttgttatagctgatgggttagtttggtaatttgcagtacgttcaggggtagtttggtaatttcagtaaggtcggaggggtagtttaggaattgtacattttgtaattttttatgtgaagcatggggacaaaatgtaatggggtgggttgtgatatagttgtttaatataaaggggggacaagacaaaatttagtggggaggaatcttgtatttgtttagtgaagcatgggggacaaaatataatggggtggtgtgatatatttatttaatgtaatggggatgagtgggaagataatgggtttggtaggaaaagggattgattttaattgattaaagggttgagattatatataggaagtcttgaacacacagaagaacaagaaaaaagaacgaatctgaaaaagaaagagaaaagaaagagagaaaaaaaaggctgaatatttaagagagagaaaaattccgaaaaatattcaaactttcaaataaaaaaaaagaaaaaaaatctttggctttctttcattgtttgaaatcagcattaattgtagttgtttcgtaaaagttggaagcatttgttttgggattactactccaccggtctgttactgggttgttattgttgctgggctgttgttgttgtgttgtactgttattactgctgctgattctcatcttcattttcttttgcttccaatatcaggtacacaannnnnnnnnnnnnnnnnnnnnnnnnnnnnnnnnnnnnnnnnnnnnnnnnnnnnnnnnnnnnnnnnnnnnnnnnnnnnnnnnnnnnnnnnnnnnnnnnnnnnnnnnnnnnnnnnnnnnnnnnnnnnnnnnnnnnnnnnnnnnnnnnnnnnnnnnnnnnnnnnnnnnnnnnnnnnnnnnnnnnnnnnnnnnnnnnnnnnnnnnnnnnnnnnnnnnnnnnnnnnnnnnnnnnnnnnnnnnnnnnnnnnnnnnnnnnnnnnnnnnnnnnnnnnnnnnnnnnnnnnnnnnnnnnnnnnnnnnnnnnnnnnnnnnnnnnnnnnnnnnnnnnnnnnnnnnnnnnnnnnnnnnnnnnnnnnnnnnnnnnnnnnnnnnnnnnnnnnnnnnnnnnnnnnnnnnnnnnnnnnnnnnnnnnnnnnnnnnnnnnnnnnnnnnnnnnnnnnnnnnnnnnnnnnnnnnnnnnnnnnnnnnnnnnnnnnnnnnnnnnnnnnnnnnnnnnnnnnnnnnnnnnnnnnnnnnnnnnnnnnnnnnnnnnnnnnnnnnnnnnnnnnnnnnnnnnnnnnnnnnnnnnnnnnnnnnnnnnnnnnnnnnnnnnnnnnnnnnnnnnnnnnnnnnnnnnnnnnnnnnnnnnnnnnnnnnnnnnnnnnnnnnnnnnnnnnnnnnnnnnnnnnnnnnnnnnnnnnnnnnnnnnnnnnnnnnnnnnnnnnnnnnnnnnnnnnnnnnnnnnnnnnnnnnnnnnnnnnnnnnnnnnnnnnnnnnnnnnnnnnnnnnnnnnnnnnnnnnnnnnnnnnnnnnnnnnnnnnnnnnnnnnnnnnnnnnnnnnnnnnnnnnnnnnnnnnnnnnnnnnnnnnnnnnnnnnnnnnnnnnnnnnnnnnnnnnnnnnnnnnnnnnnnnnnnnnnnnnnnnnnnnnnnnnnnnnnnnnnnnnnnnnnnnnnnnnnnnnnnnnnnnnnnnnnnnnnnnnnnnnnnnnnnnnnnnnnnnnnnnnnnnnnnnnnnnnnnnnnnnnnnnnnnnnnnnnnnnnnnnnnnnnnnnnnnnnnnnnnnnnnnnnnnnnnnnnnnnnnnnnnnnnnnnnnnnnnnnnnnnnnnnnnnnnnnnnnnnnnnnnnnnnnnnnnnnnnnnnnnnnnnnnnnnnnnnnnnnnnnnnnnnnnnnnnnnnnnnnnnnnnnnnnnnnnnnnnnnnnnnnnnnnnnnnnnnnnnnnnnnnnnnnnnnnnnnnnnnnnnnnnnnnnnnnnnnnnnnnnnnnnnnnnnnnnnnnnnnnnnnnnnnnnnnnnnnnnnnnnnnnnnnnnnnnnnnnnnnnnnnnnnnnnnnnnnnnnnnnnnnnnnnnnnnnnnnnnnnnnnnnnnnnnnnnnnnnnnnnnnnnnnnnnnnnnnnnnnnnnnnnnnnnnnnnnnnnnnnnnnnnnnnnnnnnnnnnnnnnnnnnnnnnnnnnnnnnnnnnnnnnnnnnnnnnnnnnnnnnnnnnnnnnnnnnnnnnnnnnnnnnnnnnnnnnnnnnnnnnnnnnnnnnnnnnnnnnnnnnnnnnnnnnnnnnnnnnnnnnnnnnnnnnnnnnnnnnnnnnnnnnnnnnnnnnnnnnnnnnnnnnnnnnnnnnnnnnnnnnnnnnnnnnnnnnnnnnnnnnnnnnnnnnnnnnnnnnnnnnnnnnnnnnnnnnnnnnnnnnnnnnnnnnnnnnnnnnnnnnnnnnnnnnnnnnnnnnnnnnnnnnnnnnnnnnnnnnnnnnnnnnnnnnnnnnnnnnnnnnnnnnnnnnnnnnnnnnnnnnnnnnnnnnnnnnttataaaaataaaataaataatgataaaagcggtaaaaagataaaacttgcacataagttcatatttgtataaaaatcagataatcaagccgaannnnnnnnnnnnnnnnnnnnnnnnnnnnnnnnnnnnnnnnnnnnnnnnnnnnnnnnnnnnnnnnnnnnnnnnnnnnnnnnnnnnnnnnnnnnnnnnnnnnnnnnnnnnnnnnnnnnnnnnnnnnnnnnnnnnnnnnnnnnnnnnnnnnnnnnnnnnnnnnnnnnnnnnnnnnnnnnnnnnnnnnnnnnnnnnnnnnnnnnnnnnnnnnnnnnnnnnnnnnnnnnnnnnnnnnnnnnnnnnnnnnnnnnnnnnnnnnnnnnnnnnnnnnnnnnnnnnnnnnnnnnnnnnnnnnnnnnnnnnattgtcctttaattggaaaaaactcccttgtaccctcgcggggcggaaaaatgaggtgtgacaaaccctataggcacgatctctattattaaagccattttagatcctataggcatggtttctaattgtgtgggagtaaagcaaacataacaaatacatttgaatccacatggaccctatgggcatgatatctacccaatttgcccaatatacataactaccctccctttttcacttatcaccccactgtttatttacaaataattagtacaggccaatgaattgaatagaaattacatataaaagaaattaatctatagggagcctgaagtaggcccaagtgatttccaagcctccagtagtctcaaatacccaaagttacatagccaaattcatgtctaggtgtatcagagttccctaaggacctcaatgatcccgagcaatactcacacctagacctttttcaaaaataattggtttaggtgcagtgtggaaatgccagctctgacatgccagagttcagagagatctcaagggtctcaaggcagtacacatatcagaggggcaggacatagtattctaatagtaaatggaagtgcatagtggtttgaaagagtttaatagaaaggttttaggactgaaaagaacttctgaaaaccattggtgataaaatagtttgagggaaagtataaagaagcaattttgtaatcagaaaacaagacaaagatcaaacaagctttaggaagcaactttggcaagcagctttcacacaaagggaagagggattgggaagatagagagtacaccttaatgaaccatacaaacaataggatatagagagttttgagggggctctacagatgtagcaaagatcacatcagaaacatgctaaagacatctaaaccacacaactagaaccactttaaggagactgactggcttagtaggagtgaaacagaacatgcaaggacttaaatggacatactaggtaagtgctaacaagtgtaggcatgctagttacatagaagcagagtctaaaaagaaacagtagctagttaaacacgcttaagttgtatatgtagacatgttaaacaagatagcaaacatgcaagtaaagtggaagtacactaatcacaatttgaataggcagtattagacatgcttgaacaagcagtaaacagaaacaagaatggacattaggccacttgaactaaagcagtaagtaaagacataggttttgatttaaaaattaatcagaagcatacctaattaaagaatgaaaaacacaagatgtgagaaaggcagtgtgcaacttccagcctgggcttgcagccggctagaatggcaaatatcacaagtagcaaagagagcagaaatagagcctttttgagtgaaaaagtagtagttttgaactattgttcgttctccagaagttaaaataagagggagtttatatagtaatcaaaagctttaaaaaataaggcaagggatcaattaagttgcaatcatgaaattcatggaatcaatcacacatgtaaatcagtaagtcttttctttaatcacgggataaccaattaacgataaaagcctgatagatatttaaggaaaagaatcaagtaaagtttggggtatagagtaggtaattaaaggtaaatgaacagaattttctattaagggaacaatcgataagaatcgacaaataacaaaaaaggcaagggaaaactaattaaggcaagaaattcaatcaaactgagtagagaggtaagaatcaaaagttttgttaagaaaaagagttcaaatcaacccaggaaataagaacttcagaacagtcaagggtgaaatcaaagagaaaatcacgtaaagatcagcaagttttgctgacaacttaaataaagcaagaaataatagttagaataaatataggcatatagaatcaatggaaaagttgaaccaagtactcagtagaggcatattagggtaagtaaaccacgagacatctatatggctaaagaacaattacaggaaccaaggcaagaatacaattagtacacgagtactcagaaaccaaacaaagaatgtcaaaaaattaaggcttttagaataaacgagttgaaattagagaaacctaatgaaatcggttaaacatacatgaaacagaagattaaacacccaaatcatcaaatgttttttggaaaaagagatttctggaaaccctagtttagagaaagatgaaaaatcattcgaaaatcagacgatccttgtaaataatcaaaggttattgtaaaaatcatatgaaataggtccaaacatctcagatcagtatagatctaagaagttcagaagaaagaaaatatggtttcgagaagaacaatcacagagatgaagaatcaaaccaagaaacccatagatataggaatatctcacttggaatcaaactaggacatgctgaaataggcgagaaatggccatagatgcaatcaaactaaccctgatcccttaagaaccctgaagatggtgataccagtacaagagaggatactagaggcctcggggtggtgaggaacaacatggaaggtagcaaacgactggtgatgtaggtagattagggttagctttaagagcatttgagagagaagagggatttccgggcggcggacggtggcaaaatgaaaggattttggggggtcgtttggtttattttaggtaagggtcaatctggaccattgatcacaatgatcaacgaccaggatttgcccgggttattgggttggggcagatgggtattaggctgcgtatattttggatttaaaattgggcttgggtagtgggttgaattaggaccaaaattgaaataaaaataggacagattttaaatagccacttttaataactaaataaattataaaaataataagtgagttccaaaaatatttttttgtatactaaaatgattaaaaatagttatttaatattttaaaaatataaaagactattttatgcataaataatgtaattatacattagtaagggatattattgcaaagatgtgcaatttagcttaaaaatgtaaatataattacgaaaaatgcacaaaaaataattaaacactatgttggaataaataataaatttaaatggataaatcaccacaaaagtaatttgaaggataattattggattatataaataaaagagaagaaataaattgatttggagcttttaaaattatagaaaaattataaaaatacttatgcatgcttataactgcatnnnnnnnnnnnnnnnnnnnnnnnnnnnnnnnnnnnnnnnnnnnnnnnnnnnnnnnnnnnnnnnnnnnnnnnnnnnnnnnnnnnnnnnnnnnnnnnnnnnnnnnnnnnnnnnnnnnnnnnnnnnnnnnnnnnnnnnnnnnnnnnnnnnnnnnnnnnnnnnnnnnnnnnnnnnnnnnnnnnnnnnnnnnnnnnnnnnnnnnnnnnnnnnnnnnnnnnnnnnnnnnnnnnnnnnnnnnnnnnnnnnnnnnnnnnnnnnnnnnnnnnnnnnnnnnnnnnnnnnnnnnnnnnnnnnnnnnnnnnnnnnnnnnnnnnnnnnnnnnnnnnnnnnnnnnnnnnnnnnnnnnnnnnnnnnnnnnnnnnnnnnnnnnnnnnnnnnnnnnnnnnnnnnnnnnnnnnnnnnnnnnnnnnnnnnnnnnnnnnnnnnnnnnnnnnnnnnnnnnnnnnnnnnnnnnnnnnnnnnnnnnnnnnnnnnnnnnnnnnnnnnnnnnnnnnnnnnnnnnnnnnnnnnnnnnnnnnnnnnnnnnnnnnnnnnnnnnnnnnnnnnnnnnnnnnnnnnnnnnnnnnnnnnnnnnnnnnnnnnnnnnnnnnnnnnnnnnnnnnnnnnnnnnnnnnnnnnnnnnnnnnnnnnnnnnnnnnnnnnnnnnnnnnnnnnnnnnnnnnnnnnnnnnnnnnnnnnnnnnnnnnnnnnnnnnnnnnnnnnnnnnnnnnnnnnnnnnnnnnnnnnnnnnnnnnnnnnnnnnnnnnnnnnnnnnnnnnnnnnnnnnnnnnnnnnnnnnnnnnnnnnnnnnnnnnnnnnnnnnnnnnnnnnnnnnnnnnnnnnnnnnnnnnnnnnnnnnnnnnnnnnnnnnnnnnnnnnnnnnnnnnnnnnnnnnnnnnnnnnnnnnnnnnnnnnnnnnnnnnnnnnnnnnnnnnnnnnnnnnnnnnnnnnnnnnnnnnnnnnnnnnnnnnnnnnnnnnnnnnnnnnnnnnnnnnnnnnnnnnnnnnnnnnnnnnnnnnnnnnnnnnnnnnnnnnnnnnnnnnnnnnnnnnnnnnnnnnnnnnnnnnnnnnnnnnnnnnnnnnnnnnnnnnnnnnnnnnnnnnnnnnnnnnnnnnnnnnnnnnnnnnnnnnnnnnnnnnnnnnnnnnnnnnnnnnnnnnnnnnnnnnnnnnnnnnnnnnnnnnnnnnnnnnnnnnnnnnnnnnnnnnnnnnnnnnnnnnnnnnnnnnnnnatgtactattttgaaagtatatatatatatatatatatatatatatatatatataatatgtgaaacaaaattgggtatcaacaataagactcctcatagcctttgttgcttacatggaatttactcttaccagatggacataaagagtgccttcctcaatggctatttaaaagaagaagtgtttgtcaagcaatctccagggtttgaaagcaagtagtgtccgaattatgtgtacaaacttgataaagcactctatgggctcaagcaggctcctagagcatggtatgaaagattatcaaaattcctgcttgagcatgactacaagagaggtaaaattgataacactttattcttgaaggaaaaaagtaaagaccttctagtagtacaaatatatgttgatgatattatctttggagcaactactgataaattaagtaaggaatttgctaaatcgaaatgagtatgatgggtgagcttaatttctttttaggcttataaattaaacaaaattcagatagaactacgatccatcagtagaaatatgtgaaagagttgcataaaaggtttaaaatggaagaataaaaagaaatcgatacttctatagcaacaaccataaaattggatatagatgaaccaggttcatctattgaatagaagttgtattgggaaatgattggttctctttttgtatcttactgctagcaaacatggcattgtttgcagtgtaggtctttgtgctcgatttcaggtaaattcaatggagtcccacttgcctaatgtcaagagaatattgagacacttgaaaggcaccactaacctttgcctttagtatccaaaaggtaataattttaacctagtgggatatgctgatgctaattatgcaggttttcttgtggataggaagagcacctcaggtatgacacactttcttgatttatgtcttgtgtcatgggatattaaaaagcaaagttcagtagccttatctactgctgaagctgagtatgttgctgctgcttcatgttgtgctcaattgttgtggatcaaacaacaattaatggactttggaatctatgttagttgtatccccattttttgtaataacactagtgcaataagtatgacaaagaagtcaattcatcataagaggactaagcacatagatgttagtcatccttttttgagggataactatgagaaaggcttgattactatacaattttgtgctactaacaagcaaattgctgacatcttcacaaatgccttaagtagagatgattaaaatcacctaaagggccagttcaaggttaaacaaaaaaaaacaaaaaaaaacaacaaaattttggttagaaagtctgtacattgtacataagtagattaaatcttgatcagtctcatacattcaatagtatatcttgttccatgtgttaaaataactcattaatctctaatgttattttctttattttacaaatttagatttacacaagaaaattattagagaagaacctggtttatcaagataacacggtatgctttctacactctgcatattttgaaataataatatttgaatcatgagcaaagtcctacctaagctaaatttcctttgaacttatccaataagtgaaccagttcagtgcatagattcccacccaaattaagtcacctagattctaaggaatactccatcgtctagtcaaaaactgaaatttcagtttcattagacttctaagagtctgaaaaagcctattgttacccattaattactctctttaaattgatcatcatcatccctgccttcactccctaattttcaaaccgtcaaaaccttctccatcttctctcattctccaaaattcaatctatctttcttcattcttccaaatccaagatactaacccctctgataatcatggtactcccccaccaaactcttcatcttcaaccactccttagcctaagaaatggagagttaagatgcttgctcacaagaacattgctgggaaggaattatcaaagaaattgaatgcacaattaaaatctagccaagcccaggaaccctagaaatttgacaactccttcaagtcagctactgagggggaagaaacggggtcttctaatactgaacaggtaacttctggaataaatactatgaatgaggttatttctgtgttagttgaaaatttggagaataggtttgttttagttggatctgttgtggatgtagaaactccaaagtctagaaagagaggtgctaaaaatagaaaggaaaaagactaggagagtgagggtattcgaagtgaagaaatgggaatggtaacaaaagtggttgactcttcacccacttctgatgaaggaagaatgactaattgtggagcagaatcagataatttagaggaaaacgtcaagaaaatagggggaggtgggtctagcgaagccgttgaagggctggctaaaattgggtaaaatatagataaacctggttcaacagttgatgaaaccctcacagacctattaaagaaggtgagtgatagctacaacccaaagaattagagaacttcactggctaagacccgtggcactgctagggctaacaagaaaaggaaggttgtccccctctgacactgttgaagttcctccaatggcaagagccacaagaagtcaattaaagcagaatgaggaagatctacagagagccttagaataaagcaaaaagaaaaggatggataaagggtagaagaagataggaaagtctgttgagactattgatgtggatgagatggatctggtccatcaagatgaagatgtgactgctgaactggaggttcagactcctaagcccaagaaatccaagactttctccaagaagtctacttctatgtcaaagtctgctgaactatccaccctggcaaaaaggaccaggtccacagtgaaaaccatacaagcaaaagttactgaaggagaggcgtggagtagtgaagaggaagatgaatcagacagtgaaaaggacaagatggctaagtttggcaaaagaactattctgaagggtagattcctcaaggatttggaggaggaagggatagtattgctgttggaaaaattagaagtacaaggctggaaggacatggtcctttagatggatggcaagttggctagggatgaaatagttgaatttatggcaaatgctgcagtgctagatggaagggatactagcttagtgaaaggggtgcaaatctcttttgatatgaaggagttgggtggaattctaggtgtacatgatgaagggtacaataattacaaaaagcttaagtggcaaagcctagaaaattttcctactgcccttgccatcaccagaaaattcagtgatcatgagaaggaaagtgtgcccaagactgtgtacaagagtgaaatgaagtcaccccacaaggttttgtttgaatttgtcatcaaatatgttctgcctaggtatgagaggaggcacactgcaaacttcatggacttggttctaatggagtgtctagattgtgggaagtagataaattggcctggatttataatccagtttcttgatagggttatcaatggtaccaagtctcattctattccctatggtttcattcttacaactgtgctttcttgttttaaggtgcctttgaataagtgtgaggtggctacaagcaaagatcactttggggcgaaaactttgattgcttgtgactatgaggtccatgccactcctaatgaacctggttcacatccaagaagataccagtaaatagctcttggtataggaaagtgaggcaaaggaagctaagatagcaaggatgaagacacggttggctgaggtagaatctgagagagatgctctcagaacaaaacttgcaagacaaaaggagaagaatgatggaatttttcaagacatgctgaaacttctccaagaaaataacccagcacctcgttcttccaagcctaaagttcctagcctagtgtagttccttcagtgacccagcttgggatgtttcttttgttgatgtttgctcatgttttcaatatttttatttccttttatgtattgtggaagaatcatatcaactatcaatgaaatcaatgaaatctactggtttttgttctaactgtttgtttttatttctttgatggttgaaattcttagcttaatcaatgatgattaatccatgattgcatttgggatagcccgagtgtacatgagtaagttttacaatccgggtattgcacatttttatgcactttttctatgatgccaaaagggggaaaataagttgtgctttaaacaagcgatatttagctttgaacatgtgatatttataaccttatgaacctggtccttgatgataagtgataacaaggaaaaatatttctaacattttgttgatattaagctgagtttaaacagggcctaagcttatgaaaagcacatagtttgtcatcatcaaaaaggaaaaatttattggcccaagtgaaggtttgttttgaagactgacaaaggaactcaggcatgagccaggtctatcctttgtgaacacgggcagagttgtgcatgtgggatgcacgtgatggagataaacttaacttggcacaattgatatctcctgatcggaaaggttgtataattgattaggagaaggacttcttactcaaagagaacattatccaagatagggaaggagtcagaagttgggatcaactagaacttttccactaaggaagagtagtattagaactctagttatttgttcatatactaactctatatattgtaggatgttctcatttacaggtaatgtacaaatgcagaagttaaacaagaattgagagcaaaatagcaaggcattttgcaagcagtttgtgtgtgattcaagtgtgcaaatatgaatctacatgaaccagatagaagaaccagttccaagtgtctctcttttattctagttcaattatagtaggtgttttcatattgtacctttcagctttatgtagaggcaattgtaatatatactcaaaatattcaatttagagttaacttgaagttgccacaataattagaggttgtgtgctacaacgtgattagagttagtcctaggtttacaaatatttttttgtaaatgcagtttttggttcagtgattttagtggagagtttggaaaaatcctactggaaagtaggtcgtggttttttcaccctttgagccaaatattttcacgtaaaatacttgtgttttttacttttcgcatttactatttctgcaatagtaggttaaggatcacttagaagaatcacgttcttccataatcagtttaagtaaaaaattggacaccacacaaattatcctttgtgtggtattgaagttgaaacatcaatgttatgcgtatgatcttcccacaaagtttaacaaggatctgttcaaaaaattaccctgatttagacccgtggagttctatctccttgttttgtatgacttttcttgtgggaaggtggatggtgttgcgtgtggcagtgttggtggggagagataaggagaaagtagatggtggtgaaaggtgttccatgtctgcaatgtgtgcatatctaatagtaatatacgttaacttaggttcaggtgttcaataggaataaagtttagtttaggtatctaaattaaaaaggcggacaagttccaggggagcatatgtatttgaccttggataaagatgcagattctattttatacaattatgacatgtatcaatcgcctattttgtacattgcacttcctttctgtagtagtaagtgtattcctagcagtttctcttttacgtatttagttttctcattgtcttaagaggtctttggggaattcagttttcctgcgaggatactctatggagtatatgtaatgtttatgatcactgcgactgtttcttaacttaatactagtaaggcaagcccgtgctacgcacgggtccaacactattaacataacttttctgatacaaaagatattttctgtattaagttcaattaacacataaaaacttgagagtttgaaaattggatacaacttctaatgcaattttatttttcgtcatctgaagccaccttcccgttgcaatctcaataaagggaaacctttgaagaaaaaatgagttgaaatctctttatttcatgacggagtaatataaaattataaattataaggttggaaaatcattctaaataacaaaagtgatgaaattcacttgcttgaaaaatgcggaagacaaaataaaagaataacagggttctggttcaaaacattgcgtatacttaaaaaggaaataatacattcaataaatatcactttctcaactttcctaaaacatttggacataaaaaagatacatttactatctcatattaaattcttctaggcacttgatgcgattatataccgcccttttgttggtttcctttacactacaatcacgtaagaacagatcaatataacgcatcaactcttgatgccttaacattatcctctgaactcttatggcagatcaaaggaaactattccaaaaatattttattgaccattatcttcgtattttggagctttgtaaatttgctttatagatgacacaatgttattcctcttaacattattccaaagtttggcgaacttgatattttcacttattaagtccttatatgaagagctagcttacaaagatcaaatgatttgtcttcaacctgcagtaaagagcaacaacttaatgagagaacacaagtgaactcataaagagccattttacaactttcaacaatgtggccgtttagaaatcaaatattccatgtccaaaaaaaccttaaagtacaagaactatttgattatctaataattttggattttatatttcatccaagagtttctaaataaagatataaaatgtcagaatgaaaattcgatgaccaacaacttatgacagaatatgtgtattcattgtgtgtgatgatccaaagggtcataaccggttttctacctttttctgggctttcgaggtcttgaaaacctcatctttagttgcctcgatttgcgtgcatagtccaggcgcgtagccggaaaagcttatgtgttaaattatgtgaaatttgataaattgtggctttaaaatggttaaagttgattttggtcaacattttgggtgaacgaacccggacccatgatttgatggtcccgaaggatctgtagaaaaatatgggactcgggcgtatgcctggaatcgaaattcgaggtcccgagcccgagaaatgaatttttaaaagaaattgttttttgaaatttaatatgaaaatttgaaataaaaatgaattagaaagcattggtatcaggcccgtattttggttcaggcactcgatacaggtattatatgtggtttaagcgctttctatgaaatttggttgaaatcggacgtcatttgacgtgtttcggacctaaaactctaaatttgaaagtttatgaagtttgatagaaaaaaatgatgattttgaggcttgattcattgattttgatgttattttggcgatttgatcgcttgagtaagttcataggatgttattgagttagtgtgtgtgtttggttaggagccccgagggctcgggagtgattcagaggcggttcggggtgtttttgaccttaggaagtgttgcagaatttctgcagtcagtgcccagtcattttcttctatgcgatcacataggtatgtctgcaatcgcgtagagttattttggagtcgcccagttttgttctatgcgatcgcgttataggccatgcaatcgcgtacctctgtaaactcattctatgcgatcacacactcccttctgcgttcgcaattcacaaaaggcctagccccgctttgaccctctatgcgatcgcactcgtcatcccgtgattgcagtgaccagcctaccttcccctatgcgatcgcattccctttcccgcgatcgcatagggcaattccgcccagttattttaaaagtccaaaacagacccattacgggagttctaccatttttcataaaacttgtcttctccaagctctaggggcgatttttgaagctcttcttcatcaaagtcttttgggtaagtaatttcccacctatttccttcactcttcttcattaattactgaaattctaaacctaaatcatgaaatcaaagtagaaattaggagttttgggtagagttatgtttttggaaattttgagtgattcaacctgaatttggggtcggatcttaaaataaattatatatttgaactcgtggggttatgggtaatcaggttttggtccgaccctcgtgtttggaccatgtgggcccggggtctaattttggtatttttggaagaatgctaggaacttcatatctaagctatgtgattttgttatcgagtctttattgatattattgaattaattatgcctagatatcgttgtttcggagtcggattataaaggaaaggcggtatttgagggttgattgctattctttggaccgaggtaagtgtttgttctaactttggcttgagggaataggattagagtgttgtttgctatttgctaattgttgagtacggtgtataggcatggtgacgagtatctatacaccggagtctagcatgaccgtgagtcttatttgtgtttattcggattttgtgatacctcttccttgttaaattgataaatttcatataatgtgaagagtttgaggaagaattatgatttgtacattcttggagcattggctcgagtatatcataaagcgtgaaagtatatgaaatgattgaacccctttggagcgttggctcaggtggtaaagtgagataagaggtaaaagtgaaagaaagagaaagaattattgaattgctcccttgccgggatgcttgttgctttgttgactatctcttgccgggatgctattgttgacccttgcctgagattattgatattgttcccttgccgggtttttaactgcttaattgtgctcccttgccgggagttagctgtttatttgtattcccttgccgggatttctatcattatttgtctactcccttgccccttgtttgtgattgttgcttgggtgaggaagagtgataaagcacgaagggtgatgccgtgcattgtttgctattgtgaggaaagagtgtaaagcactgatgtgatgaaattgagtgtaaagcacgaagggtgatgccgtgattgattgatatggtgaggaaagagagtaaaagcacgaagggtgatgccgtgcatatttcatttatatgattgctttggtgaggacgagagtaaaagcacgaagggtgatgccgtgcatttgttgctttctgattctttgttgatatccgagttatgttgtttctttcattacttgttcttatttgatttacttcgaggttatagatttccttaccctatttgccttgtgattgttgtttgggtgaggaagagcgtaaagcacgaagggtgatgccgtgcaaattgttgacttttgattcttgttgacattctggctttgttacttctttctgttattgaggatttctatttgaaactgttagctccccatagcatgctcccccctcttagctgtttaaattctgtatatttccttttattgcatatatctgcacaggttgtttttggtaggtcctgtctagcctcgtcactacttcgccggggttaggccaggcacttaccagcacatggggtcggttgtgctgatgctacactctgtgcatctttttgcacagatccaggagcagcttttggacctcagcagtaggatttgatcgggagctgacttcagtccagagacaccgaggtagccttgctgacgtccgcaggcccggagtctctctctctttattcagtttgttatcttttgtaccgaaacaaacagtttataattttctttcagacgattgtatttagtaaatcttagaagttcgtgagcattgtgacaccaatcttgggtagaggattatgttaaactttccgcatttctattcagtttttatataagttaagacttccgcttgaaatttttaattatgttgcctttattacatgttgataattatggaaaagaatgtgtgttaaacggaaggtaatttaagttggcttgcctagctcctattagtaggcgccatcacgaccccgagggtgggaaatccgggtcgtgacaagttggtatcagagcactaggttacttaggtctcacaactcacggacaagctcggtagagtctgagggatcggtacggagacgtctgtatttatcccgcagaggctactgagttaggaaaacttcacatctgttctttcttgtcgtgcggttctgtttccccaatactgattgaatttctactccgttctttcgcagatggcgaggacacgcgcttcctcatcgaccgcgcagcagcccgagcccccagtagcagctcctattaggggcagagggggcgaggccgtgccagaggccgaggcaggggcagagctcagccccgagcagcagttccagaggtggagcctcatgttgattatgatgaggaggttccagctccagcagctccggtgggcccagctcaggtcccagagggtttcattgccaccccagttcttcaggacgccctggttcgattggtgggccttatggagagagtcacccgaacaggtttgcttcctgtagcaccagccacttctcaggctggaggaggggctcagactcctgctacacgcactccggagcaggtagctccccagattcagactccagcggttcagccagttggggtagttcagccgggtgccatagctcagaccggcgatggagcggctatgtccgccgatgctttgtggagactggataggttcaccaagctcttcacttctacttttgccggtgcatctactgaggatccccaggattatctagacagctgccacgaggttctcagaaacatgggtattgttgagaccaatggggttgattttgctacatttcgcttgtctggatccgccaagacttggtggagggattattgcttagcgagaccagccggatcgccatctttgacttgggagcagtttacagtgttgtttctagagaagtttctccccgttactcagagagaggcctatcggaggcagtttgagcgcctccagcagggttctatgactgttacccagtatgagaccaggttcatcgatttagctcgccatgctctcatcatacttcccaccgagagagagagggtgagaaggtttattgatggtcttattctgccgattcgtcttcagatggccaaggaggccgggagcgagatcacatttcaggaggcggccaatgtggcccgcagagttgagatggttctgtcacagggaggtggtcatgggtcggataagaggccccgtcattcaggcagattcagtggtacctcgtctggaggtagagattcgtatggtagaggccatcctcctaggccctttcagtcagctctccaggtatcacatggtatctcaggtggtcgtggttctcagacgcattatttggatcagcagtccttcagtgcaccaccagctcccatcagtgcaccgccgcttcagagtttccgaggtggtcattcaggcgacagggtcagcagtctcagcagccgagggcttgttacacttgtggtgatatgggtcacattgccaggttttgccctcgagcttcgggtagttctcagcagcagggtcctcgtcctatgattcaggcaccagttgctccacagcctgcccagccagctagaggcgggggtagaggacatagaggtggaggtagaggtcatagaggtggagctcagaccgccagaggtaggggtcagccagcagccgatcgtcccagggatgtgattcagggaggtggggcccagccccgatgttatgctttgccagccaggccagaggctgagtcatccgatgttgttattacaggtactattttggtctgtgatagagatgcttcagtgctatttgaccctggatctacgtattcatatgtgtcgtcctattttgcaccctacctggttatgcctagtgaggccttgagtattcctgtgtatgtatctacaccagtgggtgattctatagtggttgatcgggttcatcgttcctgtgttgtggtgtttaggggacttgagacccgtgttgatttgttgctcttagatatggtggatttcgacgttatattagggatggattggttgtccccgtatcatgcgatcttggattgtcatgccaagactgtgactttagccttaccggatttgccccttagagtggagagggagactcccctgttatttctatgtgaaggcgtatggtcgagaaggggtgtttggcctacttggcttatgttcgtgattccagtgctgagattccctctattgattctgtgcccgtggttcgtgagtttcctgaggttttcccatcagacttgccagggatgccacccgatagggatattgatttttgcatcgatttggctccgggcactcagcccatttctattccgccatatcgcatggccccgccagagttgaaagagttgaaagagcagttgcaagacttgcttgagaagggtttcattagacccagcgtatcgccttggggtgcgccggttctgtttgtaaagaaaaaggatggctcgatgagaatgtgcattgattaccggcaattgaacaaggttacaattaagaataagtatccactgccgaggattgatgatttgttcgatcagcttcagggtgccaaggtattttcaaagattgacttgagatctggctaccatcagttgaggattagggcatccgatgtccctaagacagcattccgcactcggtacgggcattatgagttcttggttatgtcatttgggttgaccaatgccccagcagcctttatggatttgatgaaccgagtgttcaggccttatttggactcgttcgtgatagtcttcattgatgatattttgatatattcccgcagccgggaggagcacgagcagcatcttagagtggttcttcagaccttgagggatagtcagttatatgctaagttctcgaagtgtgagttctggttgagctcagttgcatttctgggtcatgttgtatcagcagagggtattcaggttgatccaaagaagattgaggcagtcaagaactggcctagaccagcatcagcctagagattcggagtttcttggggttagcaggttactatcgtcggttcgtggaggggttctcatctattgcagccccgatgaccaggttgacccagaagggagcccagttcagatggtcggacgagtgtgaggcgagctttcagaagctcaagacagctctgactacggcaccggtattggttttgcccacaggttcagggccttatacagtctattgtgatgcatctcgtattggacttggtgcagtgttgatgcaggatggcaaggtcattgcctatgcttcgaggcagttgaaggttcatgagaagaactatccagtgcatgatttggagttggcagccattgttcacgcattgaagatttggaggcactatctgtatggcgtggcgtgtgaggtgttcacggatcataagagtcttcagtatttgttcaagcaaaaggagttgaatttgaggcagaggaggtggttggagttgttgaaagattatgacatcactatcctatatcacccgggaaaggccaatgtggtggccgatgccttgagtaggaagtcagccagtatgggcagtcttgcttatattccggtcggtgagagaccgcttgctttggacgttcaggctttggccaatcagttagtgaggttggatatttctgagcctagtagagtattagcttgcacggtcgctcgttcttcgttattggagcgtatccgtgatcggcagtttgatgatccccatttgtgtgtccttagagacacggtacagcgtggaggtgccaagcaggttaccttagatgctgatggagttttgagattgcagggtcgagtttgtgtgcctaatgtggatgggcttcgagagttgattttagaggaggcccatagctcccggtactctattcatccgggcgccgcgaagatgtatcaggacttgcggcagcattattggtggcgtagaatgaagaaggatatcgttgcctatgtggctcggtgtttgaattgtcagcaggttaagtatgagcatcagaggcctggtggtttatttttggagtggaagtgatcactatggacttcgttgttgggctcccgcagactcggaggaagttcgacgcagtttgggtcattgttgataggctgaccaagtcagcgcatttcattcctgtggcagtctcctattcatccgagaggttagctgagatctatatccgggagattgttcgccttcatggtgtgccggtatctatcatttcggaccgaggtacgcagtttacctcgcgtttctggaaagcagtcagcgagagttaggcacccaggttgagttgagtacaacatttcatcctcagacggacgggcagtccgagcggactattcagatattggaggatatgctccgagcttgtgtcattgactttggaggttcgtgggatcagttcttgcctttagcagagtttgcctacaacaacagctaccagtcgagtatccagatggctccttatgaggctttgtatggtaggcgatgtcgatctccggttggatggtttgagccgggagaggctcggttgttgggtacagatttggttcaggaggcttggacaaggtcaggatcattcaggataggcttcgtacagctcagtccaggcaaaagagctatgcagatcgaaaggttcgagatgtggctttcatggttggtgagcgggtattgctccgagtgtcgcctatgaagggcgtgatgagatttgggaagaagggcaagcttagccctaggttcattggtccatttgagattcttgatcgagtgggagaggtggcttatagacttgcattgccaccgagcttatcagccgtacatccagtgtttcatgtgtccatgcttcggaaatatcacggcgatccatcccacgtgttagatttcagcactgtccagttggacaaggacttatcttatgaggaggagccggtagctattctagaccggcaggttcgccagttgaggtcgaagagttttccttcggttcgtgttcagtggagaggtcagcctcctgaggcatcgacctgggagtccgagtccgatatgcgggaccgttatcctcaccttttccccgactcaggtacttccttcttatgtccgttcgaggacgaacggttgttttagaggtggagaatgtgacgacccaaagggtcatcaccggttttctccctttttcgtgcttccgaggccttgaaaacctcacctttagttgcctcgatttgcgtgcgcagtccgggcgcgtagccggaaaagcttatgtgttaaattatgtgaaatttgataaattgtggctttaaaatggttaaagttgactttggtcaacattttgggtaaacggacccggacccgtgatttgacggtcccggagggtccgtagaaaaatatgggactcgggcgtatgcccggaatcgaaatccgaggtcccgagcccgagaaatgaatttttaaaagaaattgttttctgaaatttaatatgaaaatttgaaataaaaatgaattagaaagcattggtatcgggcccgtattttggttccggcgcccggtacaggtcttatatgtggtttaagcgctttctgtgaaatttggttgaaatcggacgtcgtttgacgtgattcggacttgaattcctaaatttgaaacttgatgaagtttgagaaaaactcttgattttgaggtttgattcattgtttttgaagttatttaggcgatttgatcgcacggataagttcgtatgatgttgttgagttagtgcatgtgtttggttaggagccccgagggctcgggtgtttgtttcggaatggttttagacttagaaaaattgcagaactgctgtctgctggtgtccagtcttttgtgctatgcgatcgcatagctatgtccgcgatcgcatagtgtaaattttcagggttttagtttgttctatgcgatcgcatagttagtagttagcctgagaggtcctatattttgctctacgcgatcgcattatttcctctgcgatcgcagtgtgttagccagccttcactatttcctttatgcgatcgcatagtgtcattcgcgatcgcagagccctgtcccatttactctatgcgatcgcactcctttgtccgcgatcgcataggccaaattcgcccagttaaattttaaaatccagaacagtagccttacgggattcttacaaaatttcacaaactctttcttctccaaagttctagggcgatctttgaagcattctttcaccataaactcttgggttagtaatctttaacttattctcttccattttcatcaacatctattgaatttcttggcctaaaacatgtaatttagggtagaaattgggggagtgggtagagttagggctttttactttttcttgatttggacctcgttttggggtcgaatttgaaaaaattatatattcgggctcgtggatgaatgggtgatatggttttggtccgaacctcgtgtttggaccatgtgggcccggggtcgaattttggtatttttggaagaatgctaggaacttcatatctaagctatgggattttgttatcgagtctttattgatattattgaattaattatgcctagatatcgttgtttcggagtcgggttataaaggaaaggcaatatttgagggttgattgctattctttggaccgaggtaagtgtttgttctaactttggcttgagggaatatgattaaagtattgtttgctatttgctaattgttgagtacggtgtataggcatggtgacgagtatctatacaccggagtctagcatgaccgtgcctcttatttgttttttttcggatttaatgatacctcttccttgttaaattcataaatttcatataatgtgaagagtttgaggaagagttatgatttgtacattcttggagcgttggctcgagtgtatcataaatcatgaaagtatatgaaatgattaaacccctttggagcgttggctcaggtggtaaagtgagataagaggtaaaagtgaaagaaagagaaagaattattgaattgctcccttgccgggatgcttgttgctttgttgactatctcccttgccgggatgcttgttgttttgttgactatctcccttgccgggatgcttgttgctttgttgactatctcccttgccggaatgctgagattattgttattgttcccttgctgggttttttttaactgcttaattgtgctcccttgccgggagttagctgtttatttgtattcccttgccgggatttctatcattatttgtctactcccttgccccttgtttgtgattgttgcttgggtgaggaagagtgataaagcacgaagggtgatgccgtgcattgtttgctattgtgaggaaagagtgtaaagcactgatgtgatgaaattgagtgtaaagcacgaagggtgatgccgtgattgattgatatggtgaggaaagagagtaaaagcacgaagggtgatgccgtgcatatttcatttatatgattgctttggtgaggacgagagtaaaagcacgaagggtgatgccgtgcatttgttgctttctgattctttgttgatatccgagttatgttgtttctttcattacttgttcttatttgatttacttcgaggttatagatttccttaccctatttgccttgtgattgttgtttgggtgaggaagagcgtaaagcacgaagggtgatgccgtgcaaattgttgacttttgattcttgttgacattctggctttgttacttctttctgttattgaggatttctatttgaaactgttagctccccatagcatgctcccccctcttagctgtttaaattctgtatatttccttttattgcatatatctgcacaggttgtttttggtaggtcctgtctagcctcgtcactacttcgccggggttaggccaggcacttaccagcacatggggtcggttgtgctgatgctacactctgtgcatctttttgcacagatccaggagcagcttttggacctcagcagtaggatttgatcgggagctgacttcagtccagagacaccgaggtagccttgctgacgtccgcaggcccggagtctctctctctttattcagtttgttatcttttgtaccgaaacaaacagtttataattttctttcagacgattgtatttagtaaatcttagaagttcgtgagcattgtgacaccaatcttgggtagaggattatgttaaactttccgcatttctattcagtttttatataagttaagacttccgcttgaaatttttaattatgttgcctttattacatgttgataattatggaaaagaatgtgtgttaaacggaaggtaatttaagttggcttgcctagctcctattagtaggcgccatcacgaccccgagggtgggaaatccgggtcgtgacaagttggtatcagagcactaggttacttaggtctcacaactcacggacaagctcggtagagtctgagggatcggtacggagacgtctgtatttatcccgcagaggctactgagttaggaaaacttcacatctgttctttcttgtcgtgcggttctgtttccccaatactgattgaatttctactccgttctttcgcagatggcgaggacacgcgcttcctcatcgaccgcgcagcagcccgagcccccagtagcagctcctattaggggcagagggggcgaggccgtgccagaggccgaggcaggggcagagctcagccccgagcagcagttccagaggtggagcctcatgttgattatgatgaggaggttccagctccagcagctccggtgggcccagctcaggtcccagagggtttcattgccaccccagttcttcaggacgccctggttcgattggtgggccttatggagagagtcacccgaacaggtttgcttcctgtagcaccagccacttctcaggctggaggaggggctcagactcctgctacacgcactccggagcaggtagctccccagattcagactccagcggttcagccagttggggtagttcagccgggtgccatagctcagaccggcgatggagcggctatgtccgccgatgctttgtggagactggataggttcaccaagctcttcacttctacttttgccggtgcatctactgaggatccccaggattatctagacagctgccacgaggttctcagaaacatgggtattgttgagaccaatggggttgattttgctacatttcgcttgtctggatccgccaagacttggtggagggattattgcttagcgagaccagccggatcgccatctttgacttgggagcagtttacagtgttgtttctagagaagtttctccccgttactcagagagaggcctatcggaggcagtttgagcgcctccagcagggttctatgactgttacccagtatgagaccaggttcatcgatttagctcgccatgctctcatcatacttcccaccgagagagagagggtgagaaggtttattgatggtcttattctgccgattcgtcttcagatggccaaggaggccgggagcgagatcacatttcaggaggcggccaatgtggcccgcagagttgagatggttctgtcacagggaggtggtcatgggtcggataagaggccccgtcattcaggcagattcagtggtacctcgtctggaggtagagattcgtatggtagaggccatcctcctaggccctttcagtcagctctccaggtatcacatggtatctcaggtggtcgtggttctcagacgcattatttggatcagcagtccttcagtgcaccaccagctcccatcagtgcaccgccgcttcagagtttccgaggtggtcattcaggcgacagggtcagcagtctcagcagccgagggcttgttacacttgtggtgatatgggtcacattgccaggttttgccctcgagcttcgggtagttctcagcagcagggtcctcgtcctatgattcaggcaccagttgctccacagcctgcccagccagctagaggcgggggtagaggacatagaggtggaggtagaggtcatagaggtggagctcagaccgccagaggtaggggtcagccagcagccgatcgtcccagggatgtgattcagggaggtggggcccagccccgatgttatgctttgccagccaggccagaggctgagtcatccgatgttgttattacaggtactattttggtctgtgatagagatgcttcagtgctatttgaccctggatctacgtattcatatgtgtcgtcctattttgcaccctacctggttatgcctagtgaggccttgagtattcctgtgtatgtatctacaccagtgggtgattctatagtggttgatcgggttcatcgttcctgtgttgtggtgtttaggggacttgagacccgtgttgatttgttgctcttagatatggtggatttcgacgttatattagggatggattggttgtccccgtatcatgcgatcttggattgtcatgccaagactgtgactttagccttaccggatttgccccttagagtggagagggagactcccctgttatttctatgtgaaggcgtatggtcgagaaggggtgtttggcctacttggcttatgttcgtgattccagtgctgagattccctctattgattctgtgcccgtggttcgtgagtttcctgaggttttcccatcagacttgccagggatgccacccgatagggatattgatttttgcatcgatttggctccgggcactcagcccatttctattccgccatatcgcatggccccgccagagttgaaagagttgaaagagcagttgcaagacttgcttgagaagggtttcattagacccagcgtatcgccttggggtgcgccggttctgtttgtaaagaaaaaggatggctcgatgagaatgtgcattgattaccggcaattgaacaaggttacaattaagaataagtatccactgccgaggattgatgatttgttcgatcagcttcagggtgccaaggtattttcaaagattgacttgagatctggctaccatcagttgaggattagggcatccgatgtccctaagacagcattccgcactcggtacgggcattatgagttcttggttatgtcatttgggttgaccaatgccccagcagcctttatggatttgatgaaccgagtgttcaggccttatttggactcgttcgtgatagtcttcattgatgatattttgatatattcccgcagccgggaggagcacgagcagcatcttagagtggttcttcagaccttgagggatagtcagttatatgctaagttctcgaagtgtgagttctggttgagctcagttgcatttctgggtcatgttgtatcagcagagggtattcaggttgatccaaagaagattgaggcagtcaagaactggcctagaccagcatcagcctagagattcggagtttcttggggttagcaggttactatcgtcggttcgtggaggggttctcatctattgcagccccgatgaccaggttgacccagaagggagcccagttcagatggtcggacgagtgtgaggcgagctttcagaagctcaagacagctctgactacggcaccggtattggttttgcccacaggttcagggccttatacagtctattgtgatgcatctcgtattggacttggtgcagtgttgatgcaggatggcaaggtcattgcctatgcttcgaggcagttgaaggttcatgagaagaactatccagtgcatgatttggagttggcagccattgttcacgcattgaagatttggaggcactatctgtatggcgtggcgtgtgaggtgttcacggatcataagagtcttcagtatttgttcaagcaaaaggagttgaatttgaggcagaggaggtggttggagttgttgaaagattatgacatcactatcctatatcacccgggaaaggccaatgtggtggccgatgccttgagtaggaagtcagccagtatgggcagtcttgcttatattccggtcggtgagagaccgcttgctttggacgttcaggctttggccaatcagttagtgaggttggatatttctgagcctagtagagtattagcttgcacggtcgctcgttcttcgttattggagcgtatccgtgatcggcagtttgatgatccccatttgtgtgtccttagagacacggtacagcgtggaggtgccaagcaggttaccttagatgctgatggagttttgagattgcagggtcgagtttgtgtgcctaatgtggatgggcttcgagagttgattttagaggaggcccatagctcccggtactctattcatccgggcgccgcgaagatgtatcaggacttgcggcagcattattggtggcgtagaatgaagaaggatatcgttgcctatgtggctcggtgtttgaattgtcagcaggttaagtatgagcatcagaggcctggtggtttatttttggagtggaagtgatcactatggacttcgttgttgggctcccgcagactcggaggaagttcgacgcagtttgggtcattgttgataggctgaccaagtcagcgcatttcattcctgtggcagtctcctattcatccgagaggttagctgagatctatatccgggagattgttcgccttcatggtgtgccggtatctatcatttcggaccgaggtacgcagtttacctcgcgtttctggaaagcagtcagcgagagttaggcacccaggttgagttgagtacaacatttcatcctcagacggacgggcagtccgagcggactattcagatattggaggatatgctccgagcttgtgtcattgactttggaggttcgtgggatcagttcttgcctttagcagagtttgcctacaacaacagctaccagtcgagtatccagatggctccttatgaggctttgtatggtaggcgatgtcgatctccggttggatggtttgagccgggagaggctcggttgttgggtacagatttggttcaggaggcttggacaaggtcaggatcattcaggataggcttcgtacagctcagtccaggcaaaagagctatgcagatcgaaaggttcgagatgtggctttcatggttggtgagcgggtattgctccgagtgtcgcctatgaagggcgtgatgagatttgggaagaagggcaagcttagccctaggttcattggtccatttgagattcttgatcgagtgggagaggtggcttatagacttgcattgccaccgagcttatcagccgtacatccagtgtttcatgtgtccatgcttcggaaatatcacggcgatccatcccacgtgttagatttcagcactgtccagttggacaaggacttatcttatgaggaggagccggtagctattctagaccggcaggttcgccagttgaggtcgaagagttttccttcggttcgtgttcagtggagaggtcagcctcctgaggcatcgacctgggagtccgagtccgatatgcgggaccgttatcctcaccttttccccgactcaggtacttccttcttatgtccgttcgaggacgaacggttgttttagaggtggagaatgtgacgacccaaagggtcatcaccggttttctccctttttcgtgcttccgaggccttgaaaacctcacctttagttgcctcgatttgcgtgcgcagtccgggcgcgtagccggaaaagcttatgtgttaaattatgtgaaatttgataaattgtggctttaaaatggttaaagttgactttggtcaacattttgggtaaacggacccggacccgtgatttgacggtcccggagggtccgtagaaaaatatgggactcgggcgtatgcccggaatcgaaatccgaggtcccgagcccgagaaatgaatttttaaaagaaattgttttctgaaatttaatatgaaaatttgaaataaaaatgaattagaaagcattggtatcgggcccgtattttggttccggcgcccggtacaggtcttatatgtggtttaagcgctttctgtgaaatttggttgaaatcggacgtcgtttgacgtgattcggacttgaattcctaaatttgaaacttgatgaagtttgagaaaaactcttgattttgaggtttgattcattgtttttgaagttatttaggcgatttgatcgcacggataagttcgtatgatgttgttgagttagtgcatgtgtttggttaggagccccgagggctcgggtgtttgtttcggaatggttttagacttagaaaaattgcagaactgctgtctgctggtgtccagtcttttgtgctatgcgatcgcatagctatgtccgcgatcgcatagtgtaaattttcagggttttagtttgttctatgcgatcgcatagttagtagttagcctgagaggtcctatattttgctctacgcgatcgcattatttcctctgcgatcgcagtgtgttagccagccttcactatttcctttatgcgatcgcatagtgtcattcgcgatcgcagagccctgtcccatttactctatgcgatcgcactcctttgtccgcgatcgcataggccaaattcgcccagttaaattttaaaatccagaacagtagccttacgggattcttacaaaatttcacaaactctttcttctccaaagttctagggcgatctttgaagcattctttcaccataaactcttgggttagtaatctttaacttattctcttccattttcatcaacatctattgaatttcttggcctaaaacatgtaatttagggtagaaattgggggagtgggtagagttagggctttttactttttcttgatttggacctcgttttggggtcgaatttgaaaaaattatatattcgggctcgtggatgaatgggtgatatggttttggtccgaacctcgtgtttggaccatgtgggcccggggtcgaattttggtatttttggaagaatgctaggaacttcatatctaagctatgggattttgttatcgagtctttattgatattattgaattaattatgcctagatatcgttgtttcggagtcggattataaaggaaaggcggtatttgagggttgattgctattctttggaccgaggtaagtgtttgttctaactttggcttgagggaataggattagagtgttgtttgctatttgctaattgttgagtacggtgtataggcatggtgacgagtatctatacaccggagtctagcatgaccgtgagtcttatttgtgtttattcggattttgtgatacctcttccttgttaaattgataaatttcatataatgtgaagagtttgaggaagaattatgatttgtacattcttggagcattggctcgagtatatcataaagcgtgaaagtatatgaaatgattgaacccctttggagcgttggctcaggtggtaaagtgagataagaggtaaaagtgaaagaaagagaaagaattattgaattgctcccttgccgggatgcttgttgctttgttgactatctcccttgccgggatgctgagattattgatattgttcccttgccgggtttttaactgcttaattgtgctcccttgccgggagttagctgtttatttgtattcccttgccgggatttctatcattatttgtctactcccttgccccttgtttgtgattgtttcttgggtgaggaagagtgataaagcacgaagggtgatgtcgtgcattgtttgctattgtgaggaaagagtgtaaagcatgaagggtgatgtcgtgccgcatgatgtactattctgtgccgattttattgattatatggtgagtaaagagagtaaaagcacgaagggtgatgccgtgcatatttcatttatatgattgctttggtgaggacgagagcgtaaagcacgaagggtgacaacaatcacaaacaaggggcaagggagtagacaaataatgatagaaatcccggcaagggaatacaaataaacagctaactcccggcaagggagcacaattaagcagttaaaaacccggcaagggaacaatatcaataatctcagcatcccggcaagggagatagtcaacaaagcaacaagcatcccggcaagggagcaattcaataattctttctctttctttcacttttacctcttatctcactttaccacctgagccaacgctccaaaggggttcaatcatttcatatactttcacgctttatgatatactcgagccaatgctccaagaatgtacaaatcataattcttcctcaaactcttcacattatatgaaatttatcaatttaacaaggaagaggtatcacaaaatccgaataaacacaaataagactcacggtcatgctagactccggtgtatagatactcgtcaccatgcctatacaccgtactcaacaattagcaaatagcaaacaacactctaatcctattccctcaagccaaagttagaacaaacacttacctcggtccaaagaatagcaatcaaccctcaaataccgcctttcctttataatccgactccgaaacaacgatatctaggcataattaattcaataatatcaataaagactcgataacaaaatcccatagcttagatatgaagttcctagcattcttccaaaaataccaaaattcgaccccgggcccacatggtccaaacacgaggctcggaccaaaacccgattacccataaccccacgagttcaaatatataatttattttaagatccgaccccaaattgaggttgaatcactcaaaattcccaaaaacctaactctacccaaaacccctaatttctactctaaattacatgtttaggcttaggaattcaatattaatgatggaaaatgaagaaaataagggaatttactaacccaagaagtttggtgaaagaagcttcaatggacgcctaagaccttggagaagaaaagagctcgtgtgttttatgaaaatcccgtaactactgtttctggaagttttaaaaatttaactgggcgaaactatgcgatcgctcatgcgatcgcggaagaagcaatgcgatcgcatagaagaaaaggctgggctgcgacggaacaggatgcgatcgcatagagaaaatataggcttctcaggctaacactatgcgatcgcgggaggactatgcgatcgcatagaacaaactggaccctgaaatttacactatgcgatcgcggaatagctatgcgatcgcatagcacaaagactggacaacagcagacagcagttctgcaattttctaaggctaaaaccacccgaaacactccgaaacactcccgagccctcggggctcctaaccaaacacacacactaactcaacaacatcctacgaacttaaccatgcgattaaatcgccaaaataacatcataaacgaggaatcaaacctcaaaatcatcactttttcatcaaacttcataaactttcaaacttagagttttagtccgaaacacgtcaaatgacgtccgatttcaaccaaatttcacagaaagcgcttaaaccacatataagacctgtaccgggcgccggaaccaaaatacgggcccgataccaatgctttctaatcattttcatttcaaatttccaaataaatttcagaaaaacaatttcttttaaaaattcatttctcgggctcgggacctcggatttcgattccgggcatacgcccgagtcccatatttttctacggaccctccgggaccgtcaaatcacgggtccgggtccgtttacccaaaatgttgaccaaagtcaactttaaccattttaaagccaaattttcaaatttcacataatttcacacataagcttttccggctacgcgcccggactgcgcacgcaaatcgaggcaactaaaatgaggttttcaaggcctcggaagcacaaaaaagggagaaaaccggtgatgaccctttgggtcgtcacattctccacctctaaaacaaccgttcgtcctcgaacggacataagaaggaagtacctgagtcggggaaaaggtgaggataacggtcccgcatatcggactcggactcccaggtcgatgcctcaggaggctgacctctccactgaacacgaaccgaaggaaaactcttcgacctcaactgcgaacctgccggtctagaatagctaccggctcctcctcataagacaagtccttgtccaactggacagtgctgaaatctaacacgtgggatggatcgccgtgatatttccgaagcatggacacatgaaacactggatgcacggctgataagctcggtggcaatgcaagtctataagccacctctcccactcgatcaagaatctcaaatggaccaatgaacctagggctaagcttgcccttcttcccaaatctcatcacgcccttcataggcgacactcggagcaatacccgctcaccaaccatgaaagccacatctcgaaccttcgatctgcatagctcttttgcctggactgagctgtacgaagcctatcctgaatgatcctgaccttgtccaaggcctcctgaaccaaatctgtacccaacaaccgagcctctcccggctcaaaccatccaaccggagatcgacatcgcctaccatataaagcctcataaggagccatctggatactcgactggtagctgttgttgtaggcaaactctgctaaaggcaagaactgatcccacgaacctccaaagtcaatgacacaagctcggagcatatcctccaatatctgaatagtccgctcggactgcccgtccgtctgaggatgaaatgttgtactcaactcaacctgggtgcctaactctcgctgaactgctctccagaaacgcgaggtaaactgcgtacctcggtccgaaatgatagggcacaccatgaaggcgaacaatctcccggatatagatctcagctaacctctcggatgaataggagactgccacaggaatgaaatgcgctgacttggtcagcctatcaacaatgacccaaactgcgtcgaacttcctccgagtctgcgggagtccaacaacgaagtccatagtgatccgctcccacttccactcgggaagctcaatcctctgaaataaaccaccaggcctctgatgctcatacttaacctgctgacaattcaaacaccgagccacatatgcaacgatatccttcttcattctacgccaccaataatgctgccgcaaatcctgatacatcttcgcggcgcccggatgaatagagtaccgggagctatgggcctcctctaaaatcaactctcgaagcccatccacattaggcacacaaactcgaccctgcaatctcaaaactccatcatcatctaaggtaacctgcttggcacctccacgctgcaccgtgtctctaaggacacacaaatggggatcatcaaactgccgatcacggatacgctccaataacgaagaacgagcgaccgtgcaagctaatactctactaggctcagaaatatccaacctcactaactgattggccaaagcctgaacgtccaaagcaagcggtctctcaccgaccggaatataagcaagactgcccatactggctgacttcctactcaaggcatcggccaccacattggcctttcccgggtgatatagatagtgatgtcataatctttcaacaactccaaccacctcctctgcctcaaattcaactccttttgcttgaacaaatactgaagactcttatgatccgtgaacacctcacatgccacgccatacagatagtgcctccaaatcttcaatgcgtgaacaatggctgccaactccaaatcatgcactggatagttcttctcatgaatcttcaactgcctcgaagcataggcaatgaccttgccatcctgcatcaacactgcaccaagtccaatacgagatgcatcacaatagactgtataaggccctgaacctgtgggcaaaaccaataccggtgccgtagtcagagctgtcttgagcttctgaaagctcgcctcacactcgtccgaccatctgaactgggcacccttctgggtcaacctggtcatcggggctgcaatagatgagaacccctccacgaaccgacgatagtagcctgccaaccccaagaaactccgaatctctgtagctgatgctggtctaggccagttcttgactgcctcaatcttctttggatcaacctgaataccctctgctgatacaacatgacccagaaatgcaactgaactcaaccagaactcacacttcgagaacttagcatataactgactatccctcaaggtctgaagaaccactctaagatgctgctcgtgctcctcccggctgcgggaatatatcaaaatatcatcaatgaagactatcacgaacgagtccaaataaggcctgaacactcggttcatcaaatccataaaggctgctggggcattggtcaacccaaatgacataaccaagaactcataatgcccgtaccgagtgcggaatgctgtcttagggacatcggatgccctaatcctcaactgatggtagccagatctcaagtcaatctttgaaaataccttggcaccctgaagctgatcgaacaaatcatcaatcctcggcagtggatacttattcttaattgtaaccttgttcaattgccggtaatcaatgcacattctcatcgagccatcctttttctttacaaacagaaccggcgcaccccaaggcgatacgctgggtctaatgaaacccttctcaagcaagtcttgcaactgctctttcaactctttcaactctggcggggccatgcgatatggcggaatagaaatgggctgagtgcccggagccaaatcgatgcaaaaatcaatatccctatcgggtggcatccctggcaagtctgatgggaaaacctcaggaaactcacgaaccacgggcacagaatcaatagagggaatctcagcactggaatcacgaacataagccaagtaggccaaacaccccttctcgaccatacgccgagccttcacatacgaaataacactgcgggtagaatgaccaggagtccctctccactctaaacggggcaaatccggtaaggctaaagtcacagtcttggcatgacaatccaagatcgcatgatacggggacaaccaatccatccctaatataacgtcgaaatccaccatatctaagagcaacaaatcaacacgggtctcaagtcccctaaacaccacaacacaggaacgatgaacccgatcaaccactatagaatcacccactggtgtagatacatacacaggaatactcaaggcctcactaggcataaccaggtagggtgcaaaataggacgacacatatgaatacgtagatccagggtcaaatagcactgaagcatctctatcacagaccaaaatagtacctgtaataacagcatcggatgactcagcctctggcctggctggcaaagcataacatcggggctgggccccacctccctgaatcacatccctgggacgatcggctgctggctgacccctacctctggcggtctgagctccacctctatgacctctacctccacctctatgtcctctacccccgcctctagctggctgggcaggctgtggagcaactggtgcctgaatcataggacgaggaccctgctgctgagaactacccgaagctcgagggcaaaacctggcaatgtgacccatatcaccacaagtgtaacaagccctcggctgctgagactgctgaccctgtcgccctgaatgaccacctcggaaactctgaagcggcggtgcactgatgggagctggtggtgcactgaaggactgctgatccaaataatgcgtctgagaaccacgaccacctgagataccatgtgatacctggagagctgactgaaagggcctaggaggatggcctctaccatacgaatctctacctccagacgaggtaccactgaatctgcctgaatgacggggcctcttatccgacccatgaccacctccctgtgacagaaccatctcaactctgcgggccacattggccgcctcctgaaatgtgatctcgctcccggcctccttggccatctgaagacgaatcggcagaataagaccatcaataaaccttctcaccctctctctctcggtgggaagtatgatgagagcatggcgagctaaatcgatgaacctggtctcatactgggtaacagtcatagaaccctgctggaggcgctcaaactgcctccgataggcctctctctgagtaacggggagaaacttctctagaaacaacactgtaaactgctcccaagtcaaagatggcgatccggctggtctcgctaagcaataatccctccaccaagtcttggcggatccagacaagcgaaatgtagcaaaatcaaccccattggtctcaacaatacccatgtttctgagaacctcgtggcagctgtctagataatcctggggatcctcagtagatgcaccgcaaaagtagaagtgaagagcttggtgaacctatccaatctccacaaagcatcggcggacatagccgctccatcgccggtctgagctatacccggctgaacccactgctggctgaaccaccggaacctgaacctggggagctacctgctccggagtgtacgtgtagcaggagtctgacccctcctccagcctgagaagtggctggtgctactggaagcaaacccgctcgtgacgctctccatgaaggcctaccaatcggaccaaagcgtcctgaagaactggagtggcaatgaaaccctctgggacctgagctgggcccaccggagctgctggagctggaacctcctcatcataatcaacatgaggctccacctctggaactgctgctcggggctgagctctgcccctgcctcggcctctgggcctcgcctcgccctctgcccctaataggagctgctgctgggggctcgggctgctgcgcggtcgatgaggaagcgcgtgtcctcgccatctgcgaaagaacggagtagaaattcaatcagtattggggaaacagaaccgcacgacaagaaagaacagatgtgaagttttcctaactcagtagcctctgcgggataaatacagacgtctccgtaccgatccctcagactctaccgagcttgtccgtgagttgtgagacctaagtaacctagtgctctgataccaacttgtcacgacccggatttcccaccatcgggagtcgtgatggcgcctactattggagctaggccagccaagtattaaaacatttctgataacattcgcaacaatataacaaaacgagacaattaaataaaagcggaagtcttaacttatataaaactgaatagaaatgcggaaagtttaacataatcctctacccaagattggtgtcacaatgctcacgaacttctaagatttactaaatacaatcgtctgaaagaaaattataaactgtttgtttcggtacaaaagataacaaactgaataaagagagagagactccgggcctgcggacgtcagcaaggctacctcggtgtctctggactgaagtcagctcccgatcaaatcctactgctgaggtccgcgtaaagcacgaaaggtgattccatgtattgttttggtgaggacgagagtaaaagcacgaagggtgatgctgtgcaaattgttgactttttattcttcttgacattctggctttgttacttctttctgttattgaggatttctatttgaaacttttagctccccatagcatgctccccccttcttagctgtttaaattctgtatatttccttttattgcatatatctgcataggttgtttttggtaggtcctgtctagcctcgtcactacttcgcctgggttaggccaggcacttaccagcacatggggtcggttgtgctgatgctacactctgtgcatctttttgcacagatctaggagcagctttttcttcctcacccaaacaacaatcacaaggcaaatagggtaaggaaatctataacctcgaagtaaatcaaataagaacaagtaatgaaagaaacaacataactcggatatcaacaaagaatcagaaagcaacaaatacacggcatcacccttcgtgcttttactctcgtcctcaccaaagcaatcatataaatgaaatatgcacggcatcacccttcgtgcttttactctctttcctcaccatataatcaataaaatcggcacggaatggtacatcgtgcggcacgacatcacccttcgtgctttacactctttcctcacaatagcaaacaatgcacggcatcacccttcgtgctttatcactcttcctcacccaagcaacaatcacaaacaaggggcaagggagtagacaaataatgatagaaatcccggcaagggaatacaaataaacagctaactcccggcaagggagcacaattaagcagttaaaaacccggcaagggaacaatatcaataatctcagcatcccggcaagggagatagtcaacaaagcaacaagcatcccggcaagggagcaattcaataattctttctctttctttcacttttacctcttatctcactttaccacctgagccaacgctccaaaggggttcaatcatttcatatactttcacgctttatgatatactcgagccaatgctccaagaatgtacaaatcataattcttcctcaaactcttcacattatatgaaatttatcaatttaacaaggaagaggtatcacaaaatccgaataaacacaaataagactcacggtcatgctagactccggtgtatagatactcgtcaccatgcctatacaccgtactcaacaattagcaaatagcaaacaacactctaatcctattccctcaagccaaagttagaacaaacacttacctcggtccaaagaatagcaatcaaccctcaaataccgcctttcctttataatccgactccgaaacaacgatatctaggcataattaattcaataatatcaataaagactcgataacaaaatcccatagcttagatatgaagttcctagcattcttccaaaaataccaaaattcgaccccgggcccacatggtccaaacacgaggttcggaccaaaaccatatcacccattcatccacgagcccgaatatataattttttcaaattcgaccccaaaacgaggtccaaatcaagaaaaagtaaaaagccctaactctacccactcccccaatttctaccctaaattacatgttttaggccaagaaattcaatagatgttgatgaaaatggaagagaataagttaaagattactaacccaagagtttatggtgaaagaatgcttcaaagatcgccctagaactttggagaagaaagagtttgtgaaattttgtaagaatcccgtaaggctactgttctggattttaaaatttaactgggcgaatttggcctatgcgatcgcggacaaaggagtgcgatcgcatagagtaaatgggacagggctctgcgatcgcgaatgacactatgcgatcgcataaaggaaatagtgaaggctggctaacacactgcgatcgcagaggaaataatgcgatcgcgtagagcaaaatataggacctctcaggctaactactaactatgcgatcgcatagaacaaactaaaaccctgaaaatttacactatgcgatcgcggacatagctatgcgatcgcatagcacaaaagactggacaccagcagacagcagttctgcaatttttctaagtctaaaaccattccgaaacaaacacccgagccctcggggctcctaaccaaacacatgcactaactcaacaacatcatacgaacttatccgtgcgatcaaatcgcctaaataacttcaaaaacaatgaatcaaacctcaaaatcaagagtttttctcaaacttcatcaagtttcaaatttaggaattcaagtccgaatcacgtcaaacgacgtccgatttcaaccaaatttcacagaaagcgcttaaaccacatataagacctgtaccgggcgccggaaccaaaatacgggcccgataccaatgctttctaattcatttttatttcaaattttcatattaaatttcagaaaacaatttcttttaaaaattcatttctcgggctcgggacctcggatttcgattccgggcatacgcccgagtcccatatttttctacggaccctccgggaccgtcaaatcacgggtccgggtccgtttacccaaaatgttgaccaaagtcaactttaaccattttaaagccacaatttatcaaatttcacataatttaacacataagcttttccggctacgcgcccggactgcgcacgcaaatcgaggcaactaaaggtgaggttttcaaggcctcggaagcacgaaaaagggagaaaaccggtgatgaccctttgggtcgtcacattctccacctctaaaacaaccgttcgtcctcgaacggacataagaaggaagtacctgagtcggggaaaaggtgaggataacggtcccgcatatcggactcggactcccaggtcgatgcctcaggaggctgacctctccactgaacacgaaccgaaggaaaactcttcgacctcaactggcgaacctgccggtctagaatagctaccggctcctcctcataagataagtccttgtccaactggacagtgctgaaatctaacacgtgggatggatcgccgtgatatttccgaagcatggacacatgaaacactggatgtacggctgataagctcggtggcaatgcaagtctataagccacctctcccactcgatcaagaatctcaaatggaccaatgaacctagggctaagcttgcccttcttcccaaatctcatcacgcccttcataggcgacactcggagcaatacccgctcaccaaccatgaaagccacatctcgaacctttcgatctgcatagctcttttgcctggactgagctgtacgaagcctatcctgaatgatcctgaccttgtccaagcctcctgaaccaaatctgtacccaacaaccgagcctctcccggctcaaaccatccaaccggagatcgacatcgcctaccatacaaagcctcataaggagccatctggatactcgactggtagctgttgttgtaggcaaactctgctaaaggcaagaactgatcccacgaacctccaaagtcaatgacacaagctcggagcatatcctccaatatctgaatagtccgctcggactgcccgtccgtctgaggatgaaatgttgtactcaactcaacctgggtgcctaactctcgctgactgctttccagaaacgcgaggtaaactgcgtacctcggtccgaaatgatagataccggcacaccatgaaggcgaacaatctcccggatatagatctcagctaacctctcggatgaataggagactgccacaggaatgaaatgcgctgacttggtcagcctatcaacaatgacccaaactgcgtcgaacttcctccgagtctgcgggagcccaacaacgaagtccatagtgatcacttccactccaaaaataaaccaccaggcctctgatgctcatacttaacctgctgacaattcaaacaccgagccacataggcaacgatatccttcttcattctacgccaccaataatgctgccgcaagtcctgatacatcttcgcggcgcccggatgaatagagtaccgggagctatgggcctcctctaaaatcaactctcgaagcccatccacattaggcacacaaactcgaccctgcaatctcaaaactccatcagcatctaaggtaacctgcttggcacctccacgctgtaccgtgtctctaaggacacacaaatggggatcatcaaactgccgatcacggatacgctccaataacgaagaacgagcgaccgtgcaagctaatactctactaggctcagaaatatccaacctcactaactgattggccaaagcctgaacgtccaaagcaagcggtctctcaccgaccggaatataagcaagactgcccatactggctgacttcctactcaaggcatcggccaccacattggcctttcccgggtgatataggatagtgatgtcataatctttcaacaactccaaccacctcctctgcctcaaattcaactccttttgcttgaacaaatactgaagactcttatgatccgtgaacacctcacacgccacgccatacagatagtgcctccaaatcttcaatgcgtgaacaatggctgccaactccaaatcatgcactggatagttcttctcatgaaccttcaactgcctcgaagcataggcaatgaccttgccatcctgcatcaacactgcaccaagtccaatacgagatgcatcacaatagactgtataaggccctgaacctgtgggcaaaaccaataccggtgccgtagtcagagctgtcttgagcttctgaaagctcgcctcacactcgtccgaccatctgaactgggctcccttctgggtcaacctggtcatcggggctgcaatagatgagaacccctccacgaaccgacgatagtaacctgctaaccccaagaaactccgaatctctaggctgatgctggtctaggccagttcttgactgcctcaatcttctttggatcaacctgaataccctctgctgatacaacatgacccagaaatgcaactgagctcaaccagaactcacacttcgagaacttagcatataactgactatccctcaaggtctgaagaaccactctaagatgctgctcgtgctcctcccggctgcgggaatatatcaaaatatcatcaatgaagactatcacgaacgagtccaaataaggcctgaacactcggttcatcaaatccataaaggctgctggggcattggtcaacccaaatgacataaccaagaactcataatgcccgtaccgagtgcggaatgctgtcttagggacatcggatgccctaatcctcaactgatggtagccagatctcaagtcaatctttgaaaataccttggcaccctgaagctgatcgaacaaatcatcaatcctcggcagtggatacttattcttaattgtaaccttgttcaattgccggtaatcaatgcacattctcatcgagccatcctttttctttacaaacagaaccggcgcaccccaaggcgatacgctgggtctaatgaaacccttctcaagcaagtcttgcaactgctctttcaactctttcaactctggcggggccatgcgatatggcggaatagaaatgggctgagtgcccggagccaaatcgatgcaaaaatcaatatccctatcgggtggcatccctggcaagtctgatgggaaaacctcaggaaactcacgaaccacgggcacagaatcaatagagggaatctcagcactggaatcacgaacataagccaagtaggccaaacaccccttctcgaccatacgccttcacatagaaataacaggggagtctccctctccactctaaggggcaaatccggtaaggctaaagtcacagtcttggcatgacaatccaagatcgcatgatacggggacaaccaatccatccctaatataacgtcgaaatccaccatatctaagagcaacaaatcaacacgggtctcaagtcccctaaacaccacaacacaggaacgatgaacccgatcaaccactatagaatcacccactggtgtagatacatacacaggaatactcaaggcctcactaggcataaccaggtagggtgcaaaataggacgacacatatgaatacgtagatccagggtcaaatagcactgaagcatctctatcacagaccaaaatagtacctgtaataacaacatcggatgactcagcctctggcctggctggcaaagcataacatcggggctgggccccacctccctgaatcacatccctgggacgatcggctgctggctgacccctacctctggcggtctgagctccacctctatgacctctacctccacctctatgtcctctacccccgcctctagctggctgggcaggctgtggagcaactggtgcctgaatcataggacgaggaccctgctgctgagaactacccgaagctcgagggcaaaacctggcaatgtgacccatatcaccacaagtgtaacaagccctcggctgctgagactgctgaccctgtcgcctgaatgaccacctcggaaactctgaagcggcggtgcactgatgggagctggtggtgcactgaaggactgctgatccaaataatgcgtctgagaaccacgaccacctgagataccatgtgatacctggagagctgactgaaagggcctaggaggatggcctctaccatacgaatctctacctccagacgaggtaccactgaatctgcctgaatgacggggcctcttatccgacccatgaccacctccctgtgacagaaccatctcaactctgcgggccacattggccgcctcctgaaatgtgatctcgctcccggcctccttggccatctgaagacgaatcggcagaataagaccatcaataaaccttctcaccctctctctctcggtgggaagtatgatgagagcatggcgagctaaatcgatgaacctggtctcatactgggtaacagtcatagaaccctgctggaggcgctcaaactgcctccgataggcctctctctgagtaacggggagaaacttctctagaaacaacactgtaaactgctcccaagtcaaagatggcgatccggctggtctcgctaagcaataatccctccaccaagtcttggcggatccagacaagcgaaatgtagcaaaatcaaccccattggtctcaacaatacccatgtttctgagaacctcgtggcagctgtctagataatcctggggatcctcagtagatgcaccggcaaaagtagaagtgaagagcttggtgaacctatccagtctccacaaagcatcggcggacatagccgctccatcgccggtctgagctatggcacccggctgaactaccccaactggctgaaccgctggagtctgaatctggggagctacctgctccggagtgcgtgtagcaggagtctgagcccctcctccagcctgagaagtggctggtgctacaggaagcaaacctgttcgggtgactctctccataaggcccaccaatcgaaccagggcgtcctgaagaactggggtggcaatgaaaccctctgggacctgagctgggcccaccggagctgctggagctggaacctcctcatcataatcaacatgaggctccacctctggaactgctgctcggggctgagctctgcccctgcctcggcctctggcacggcctcgccccctctgcccctaataggagctgctactgggggctcgggctgctgcgcggtcgatgaggaagcgcgtgtcctcgccatctgcgaaagaacggagtagaaattcaatcagtattggggaaacagaaccgcacgacaagaaagaacagatgtgaagttttcctaactcagtagcctctgcgggataaatacagacgtctccgtaccgatccctcagactctaccgagcttgtccgtgagttgtgagacctaagtaacctagtgctctgataccaacttgtcacgacccggatttcccaccctcggggtcgtgatggcgcctactaataggagctaggcaagccaacttaaattaccttccgtttaacacacattcttttccataattatcaacatgtaataaaggcaacataattaaaaatttcaagcggaagtcttaacttatataaaaactgaatagaaatgcggaaagtttaacataatcctctacccaagattggtgtcacataacaataggatttgatcgggagctgacttcagtccagagacaccaaggcagccttgctgacgtttgcaggcccgaagtcactctctctttattcagtttgttatcttttgtaccgaaacaaacaatttataattttctttcagacgattgtatttagtaaatcttagaagttcgtgagcattgtgacaccaatcttgggtagaggattatgttaaactttccgcatttctattcagtttttatataagttaagacttccgcttgaaatttttaattatgttgcctttattacatgttgataattatggaaaagaatatgtgttaaacggaaggtaatttaagttggcttgcctagctcctattagtaggcgccatcacgaccccgagggtgggaaatttgggtcgtgacaagttggtatcagagcactaggttacttaggtctcacaactcacggacaagctcagtagagtttgagggattggtacggatacgtctatatttatccctcagaggctactgagttaggaaaacttcacatctgttctttcttgtcgtgcggttctgtttccccaatactgattgaatttctactccgttctttcgcaaatggcgaggacacgcgcttccttatcgaccgagcagcagcccgagcccccagcagcagctcctattaggggcagagggcgaggccatgctagaggccgaggtaggggcagagctcagccccgagcagcagttccagaggtggagcctcatgttgattatgatgaggaggttccagctccagtaactttggtgggcctaactcaggtcccagagggttttattgccaccctagttcttcaggacgccctggttcaattggtgggccttatggagagagtcacccgaatatgttttcttcctgtagcaccagccacttctctggctggaggaggggctcagactccttctacacgcactccggagtaggtagctccccagattcagattccagcggtttagctagttagggtagttcagccgggtgccatagctcagaccggcgatggagcggctatgttcgtcgatgctttgtggagactggataggttcaccaagctcttcacttctacttttgccggtgcatttactgaggatccccaggattatctagaaagcttccacgaggttctgagaaacatgggtattattgagaccaatggggttgattttgctacatttcgcttgtctggatccgccaagacttggtggagggattattgcttagcgagaccagccggatctccatctttgacttgggagcagtttacagtgttgtttctagagaagtttctccccgttacttagagagaggcctatcggaggcactttgagcgcctccagtagggttctatgactgttacccagtatgagaccaggttcaacgatttagctcgccatgctctcatcatacttcccaccgagagagagagggtgagaaggtttattgatggtcttattctgccaattcgtcttcagatggccaaggagggcgggagcgagatcacatttcaggaggcggtcaatgtggcccgcatagttgagatggttatgtcatatggaggtggtcataggtcggataagaggccccgtcattcaggaagattctgtggtattgcgtctggaggtagagattcgtatggtagaggccatcctcctaggctcgttcagtcagctcaccaggtatcacatggtatctcaggtggtcgtggttctcagatgcattatttggatcagtagtctttcagtgcaccaccatctcccatcagtgcaccgccacttcagaatttctgaggtggtcattcagggcaatagggtcagcagtctcagcagccgagggcttgttacacttgtggtgatatgggtcacatttctaagttttacccttgagcttcgggtagttctcaacaacagggtcctcgccttatgattcaggcaccagttgctccatagcctgcccagccagctagaggcgggggtagaggacatagaggtggaggtagaggtcatagaggtggagctcagaccgccagaggtaggggtcagccagcagccgatcgtcccagggttgtgatttagggaggtagggcccaaccccgatgttatgctttgctagccaggccagaggctaagtcatccgatgctgttattacaggtactattttggtctgtgatagagatgcttcagtgctatttgaccctggatctacgtattcacatgtgtcgtcctattttgcaccctacttggttatacgtagtgaggccttgagtattcctgtgtatgtatctacactagtaggtgattctatagtggttgattgggttcatcgttcctgtgttgtggtgtttaggggacttgagacccgtgttgatttgttgctcttagatatggtggattttgacattatattagggatggattggttgtccccgtatcatgcgatcttggattgtcatgccaagattgtgactttagccttatcggattttccccatttagagtggagagggactcctggtcattctacccgtagtgttatttcgtatgtgaaggctcggtgtatggtcgagaaggggtgtttggcctactcagcttatgttcgtgattccagtgctgagattccctctattgattctgtgaccttggttcgtgaatttcctgtggttttcccatcagacttgccaaggatgccacccgatagggatattgatttttgcatcgatttggctccgggcactcagcccatttctattccaccatatcacatgtccctgctagagttgaaagagttgaaagagcagttgcaagacttgcttgagaagggtttcattagacccagcatatcgccttggggtgcgccgactttgtttgtaaagaaaaaggatggctcgatgagaatgtgcattgattaccggcaattgaacaaggttacaattaagaataagtatccactaccgaggattgataatttgttcgatcagcttcagggtgccaaggtattttcaaagattgacttgagatgtggctaccatcagttgaggactagggcatccgatgtccctaagacagcattccgcactcggtacgggcattataagttcttggttatgtcatttgggttgaccaatgcccctgcagcctttatggatttgatgaaccgagtgttcaggacttatttggactcgttcgtgatagtcttcattgatgatattttgatatattcccgcagccgggaggagcacgagcaacatcttagattggttcttcagaccttgaggtatagtcagttatatgctaagttctcgaagtgtgagttctggttgagctcggttgcatttctgggtcacgttgtatcagcagagggtattcaggtgggcccgaagaagatagaggtagtcaagaattagcctcgaccagctttaactacagagattcagagtttcttggggttagaaggttactaccgtcggtttgtggaggggttttcatccattgcagccccgatgaccaggttgacccagaagggagcccagttcagatggccggacgagtgtgaggcgaactttcagaagctcaagaccgctctgactacgacaccggtattggttttgcccgcaggctcagggccttatacagtctattatgatgcatctcgtattggacttgatgcagtgttgatgtaggatggcaaggtcattgcctatgcttcgaggcagttgaaggttcatgagaagaactatcctgtgcatgatttggagttggcagccattgttcacgcattgaagatttggaggcactatctgtatggcgtggcgtgtgaggtgttcacggatcataagcgtctttagtatttgttcaagcaaaaggagttgaatttgaggcagaggaggtggttgaagttgttgaaagattatgacatcactatcctatatcacccgggaaagtccaatgtggtggccgataccttgagtaggaagtcagccagtatggtcagtcttgcttatattccggtcggcgagagacctcttgctttggacgttcaggatttggccaatcagttaatgaggttggatatttctgagcctagtagagtattagctagcacggtcgcccgttcttcgttattagagcgtatccatgatcgacagtttgatgatccccatttgtgtgtccttagggacacggtacagcgtggaggtgccaagaaggttaccttagatgctgatggatttttgagattgcagggtcaagtttgtgtgcctaatgtggatgggcttcgagagttgattttagaggaggcccatagctcccgatactctaatcatccgggcgccgcgaagatgtatcaggacttgcgacagcattattggtggcgtagaatgaagaaggatatcgttgcctatgtggctcggtgtttgaattgtcaacaggttaagtatgagcatcagaggcctggtggtttatttcagaggattgagcttcccgagtggaagtggaagcggatcactatggacttcgttgttgggctcccgcaggctcggaggaagtttgacgcagtttgggtcattgttggtaggctgaccaagtcagcgcatttcattcctgtggcagtctcctattcatccgagaggttagctgatatttatatctgggagattttttgccttcatggtatgccagtatctatcatttcggaccgaggtacgcagtttatctcgcgtttatggaaagcagtccagcgagagttaggcacctaggttgagttgagtacaacatttcgtcctcagacggacgggcagtccgagcggactattcagatattggaggatatgctccgagcttgtgtcattgactttggaggttcgtgggatcagttcttgcctttagcagagtttgcctacaacaacagctaccagtcgagtatccagatggctccttatgaggctttgtattgtaggcgatgtcgatctccggttggatggtttgagccgggagaggctcagttgttgggtacagatttggttcaggaggctttggacaaggtcaggatcattcaggatagacttcgtacaactcagtccaggaaaaagagctacgcagatcgaaaggttcgagatgtggctttcatggttggtgagcgggtattgctccgagtgtcgcctatgaagggcgtgatgagatttgggaagaagggcaagcttagccctaggttcattggtccatttgagattcttgatcgagtgggagaggtggcttatagacttgcattgccaccgagcttatcagccgtacatccagtgtttcatgtgtccatggttcagaaatatcacggcgatccatcccacgtgttagatttcagcactgtccagttggataaggacttatcttatgaggaggagtcggtagctattctagaccggcaggttcgccagttgaggtcgaagagtattcctttggttcatgttcagtggagaggtcagcctcttgaggcatcgacctgggagtccgagtccgatatgcaggaccgttatcctcaccttttccccgactcaggtacttccttcttatgtccgttcgaggacgaacggttgttttagaggtggagaatgtgannnnnnnnnnnnnnnnnnnnnnnnnnnnnnnnnnttccccctttttctgtgcttctgaggtcttgaaaacctcacctttaattgcctcaatttgcgtgcatagtccaggtgcgtagccggaaaagcttatatgttaaattatgtgaaatttgataaattgtggctttaaaatgattaaagttgactttggtcaacattttaggtaaacgggctcggacccgtgatttgacggtcccggagggtccgtagaaaaatatgggactcgggcgtatgcccggaatcgatatccgaggtcccgagcccgagaaatgaatttttaaaagaaattgttttatgaaatttaatatgaaaatttgaaataaaaatgaattagaaagcattggtatcaggcccgtattttggttccggcgcccggtacaggtcttatatgtggtttaaggactttctgtgaaatttggttgaaatcggacgtcatttgacgtgtttcagacctaaaactctaagtttgaaagtttatgaagtttgataaaaaaatgatgattttgaggcttgattcattgattttgatgttattttcacgatttgatcgctcgagtaagttcgtaggatgttattgagttagtgtgtgtgtttggttaggagccccgagggctcgggagtgatttagaggaggttcggggtgtttttggccttaggaagtgttgcagaatttctgtagtcagtgcccagtcattttcttctatgcgatcacataggtatgtctgcgatcacgtagagttattttggagtcgcccagttttgttctatgcgatcgcgttataggacatgcgatcgcgtacctctgcaaactcattttatgcgatcacacactcccttctgcgatcgcaattcacaaaaggcccagccccgctttgaccctctatgcgatcgcaatcgtcatcccgcgatcgcagtgactagcctaccttcctctatgcgatcgcattccctttcccgtgatcgcatagggcaattctgcccagttattttaaaagtccaaaacatacccattacgggagttctaccatttttcataaaacttgtcttctccaagctctaggggtgatttttgaagctcttcttcgtcaaagtcttttgggtaagtaatttcccacctatttccttcactcttcttcattaattactgaaattctaaacctaaatcatgaaatcaaagtagaaattaggggttttgggtagagttaggcttttgggaattttgagtgattcaacctcaatttaaggtcggatcttaaaataaattatatatttgaactcgtggggttatggttaatcgggttttggtccgagcctcgtgtttggaccatgtgggcccggggtcgaattttggtatttttggaagaatgctaggaacttcatatctctacccaaaacccctaatttctactttgatttcatgatttaggtttagaatttcagtaattaatgaagaagagtgaaggaaataggtgggaaattacttacccaaaagactttgatgaagaagagcttcaaaaatcgcccctagagcttggagaagacaagttttatgaaaaatggtagaactcccgtaatgggtctgttttggacttttaaaataactgggcggaattgccctatgcgatcgcaaagggaatggatcggggaaggtaggtcactgcgatcgcgggatgacgagtgcgatcgcatagagggtcaaagcggggctgggccttttgtgaattgcgatcgcagaagggagtgtgcgatcgcatagaatgagtttgcagaggtacgcgatcgcatggcctataacgcgatcgcatagaacaaaactgggcgactccaaaataactctacgcgatcgcagacatacctatgcgatcgcatagaagaaaatgactgggcactgactgcagaaattctgcaacacttcctaaggccaaaaacaccccgaaccgcctccgaatcactcccgagccctcggggctcctaaccaaacacacacactaactcaataacatcctacgaacttactcgagcgatcaaatcgccaaaataacatcaaaatcaatgaatcaagcctcaaaatcatcatttttttatcaaacttcataaactttcaaatttaggaattttaagtccgaaacacgtcaaacgacgtccgatttcaaccaaatttcacagaaagcgcttaaaccacatataagacctgtaccgggcgccggaaccaaaatacgggcccgataccaatgctttctaattcattttcatttcaaatttccaaataaatttcagaaaacaatttcttttaaaaattcatttctcgggctcgggacctcggatttcgattccgggcatacgcccgagtcccatatttttctacggaccctccgggaccgtcaaatcacgggtccgggtccgtttacccaaaatgttgaccaaagtcaactttaaccattttaaagccacaatttatcaaatttcacataatttaacacataagcttttccggctacgcgcccggactgcacacgcaaatcgaggcaactaaaggtgaggttttcaaggcctcgaaagcacggaaaaagggagaaaaccggtgatgaccctttgggtcgtcacattctccacctctaaaacaaccgttcaaaacggacataagaaggaagtacctgagtcggggaaaaggtgaggataacggtcccgcatatcggactcggactcccaggtcgatgcctcaggaggctgacctctccactgaacacgaaccgaaggaaaactcttcgacctcaactggcgaacctgccggtctagaatagctaccggctcctcctcataagataagtccttgtccaactggacagtgctgaaatctaacacgtgggatggatcgccgtgatatttccgaagcatggacacatgaaacactggatgtacggctgataagctcggtggcaatgcaagtctataagccacctctcccactcgatcaagaatctcaaatggaccaatgaacctagggctaagcttgcccttcttcccaaatctcatcacgcccttcataggcgacactcggagcaatacccgctcaccaaccatgaaagccacatctcgaacctttcgatctgcatagctcttttgcctggactgagctgtacgaagtctatcctgaatgatcctgaccttgtccaaagcctcctgaaccaaatctgtacccaacaaccgagcctctcccggctcaaaccatccaaccggagatcgacatcgcctaccatacaaagcctcataaggagccatctggatactcgactggtagctgttgttgtaggcaaactctgctaaaggcaagaactgatcccacgaacctccaaagtcaatgacacaagctcggagcatatcctccaatatctgaatagtccgctcggactgcccgtccgtctgaggatgaaatgttgtactcaactcaacctgggtgcctaactctcgctggactgctttccagaaacgcgaggtaaactgcgtacctcggtccgaaatgatagataccggcacaccatgaaggcgaacaatctcccggatatagatctcagctaacctctcggatgaataggagactgccacaggaatgaaatgcgctgacttggtcagcctatcaacaatgacccaaactgcgtcgaacttcctccgagtctgcgggagcccaacaacgaagtccatagtgatccgctcccacttccactcgggaagctcaatcctctgaaataaaccaccaggcctctgatgctcatacttaacctgctgacaattcaaacaccgagccacataggcaacgatatccttcttcattctacgccaccaataatgctgtcgcaagtcctgatacatcttcgcggcgcccggatgaatagagtaccgggaactatgggcctcctctaaaatcaactctcgaagcccatccacattaggcacacaaactcgaccctgcaatctcaaaactccatcagcatctaaggtaacctgcttggcacctccacgctgtaccgtgtccctaaggacacacaaatggggatcatcaaactgccgatcacggatacgctccataacgaagaacgagcgaccgtgcaagctaatactctactaggctcagaaatatccaacctcacaactgattggccaaagcctgaacgtccaaagcaagcggtctctcaccgaccggaatataagcaagactgcccatactggctgacttcctactcaaggcatcggccaccacattggcctttcccgggtgatataggatagtgatgtcataatctttcaacaactccaaccacctcctctgcctcaaattcaactccttttgcttgaacaaatactgaagactcttatgatccgtgaacacctcacacgccacgccatacagatagtgcctccaaatcttcaatgcgtgaacaatggctgccaactccaaatcatgcactggatagttcttctcatgaaccttcaactgcctcgaagcataggcaatgaccttgccatcctgcatcaacactgcaccaagtccaatacgagatgcatcacaatagactgtataaggccctgaacctgtgggcaaaaccaataccggtgccgtagtcagagctgtcttgagcttctgaaagctcgcctcacactcgtccgaccatctgaactgggcacccttctgggtcaacctggtcatcggggctgcaatagatgagaacccctccacgaaccgacgatagtaacctgctaaccccaagaaactccgaatctctgtagctgatgctggtctaggccagttcttgactgcctcaatcttcttcggatcaacctgaataccctctgctgatacaacatgacccagaaatgcaactgagctcaaccagaactcacacttcgagaacttagcatataactgactatccctcaaggtctgaagaaccactctaagatgctgctcgtgctcctcccggctgcgggaatatatcaaaatatcatcaatgaagactatcacgaacgagtccaaataaggcctgaacactcggttcatcaaatccataaaggctgtggggcattggtcaacccaaatgacataaccaagaactcataatgcccgtaccgagtgcggaatgctgtcttagggacatcggatgccctaatcctcaactgatggtagccagatctcaagtcaatctttgaaaataccttggcaccctgaagctgatcgaacaaatcatcaatcctcggcagtggatacttattcttaattgtaaccttgttcaattgccggtaatcaatgcacattctcatcgagccatcctttttctttacaaacagaaccggcgcaccccaaggcgatacgctgggtctaatgaaacccttctcaagcaagtcttgcaactgctctttcaactctttcaactctggcggggccatgcgatatggcggaatagaaatgggctgagtgcccggagccaaatcgatgcaaaaatcaatatccctatcgggtggcatccctggcaagtctgatgggaaaacctcaggaaactcacgaaccacgggcacagaatcaatagagggaatctcagcactggaatcacgaacataagccaagtaggccaaacaccccttctcgaccatacgccgagccttcacatacgaaataacactgcgggtagaatgaccaggagtccctctccactctaaacggggcaaatccggtaaggctaaagtcacagtcttggcatgacaatccaagatcgcatgatacggggacaaccaatccatccctaatataacgtcgaaatccaccatatctaagagcaacaaatcaacacgggtctcaagtcccctaaacaccacaacacaggaacgatgaacccgatcaaccactatagaatcacccactggtgtagatacatacacaggaatactcaaggcctcactaggcataaccaggtagggtgcaaaataggacgacacatatgaatacgtagatccagggtcaaatagcactgaagcatctctatcacagaccaaaatagtacctgtaataacagcatcggatgactcagcctctggcctggctggcaaagcataacatcggggctgggccccacctccctgaatcacatccctgggacgatcggctgctggctgacccctacctctggcggtctgagctccacctctatgacctctacctccacctctatgtcctctacccccgcctctagctggctgggcaggctgtggagcaactggtgcctgaatcataggacgaggaccctgctgctgagaactacccgaagctcgagggcaaaacctggcaatgtgacccatatcaccacaagtgtaacaagccctcggctgctgagactgctgaccctgtcgccctgaatgaccacctcggaaactctgaagcggcggtgcactgatgggagctggtggtgcactgaaggactgctgatccaaataatgcgtctgagaaccacgaccacctgagataccatgtgatacctggagagctgactgaaagggcctaggaggatggcctctaccatacgaatctctacctccagacgaggtaccactgaatctgcctgaatgacggggcctcttatccgacccatgaccacctccctgtgacagaaccatctcaactctgcgggccacattggccgcctcctgaaatgtgatctcgctcccggcctccttggccatctgaagacgaatcggcagaataagaccatcaataaaccttctcaccctctctctctcggtgggaagtatgatgagagcatggcgagctaaatcgatgaacctggtctcatactgggtaacagtcatagaaccctgctggaggcgctcaaactgcctccgataggcctctctctgagtaacggggagaaacttctctagaaacaacactgtaaactgctcccaagtcaaagatggcgatccggctggtctcgctaagcaataatccctccaccaagtcttggcggatccagacaagcgaaatgtagcaaaatcaaccccattggtctcaacaatacccatgtttctgagaacctcgtggcagctgtctagataatcctggggatcctcagtagatgcaccggcaaaagtagaagtgaagagcttggtgaacctatccagtctccacaaagcatcggcggacatagccgctccatcgccggtctgagctatggcacccggctgaactacccaactggctgaaccgctggagtctgaatctggggagctacctgctccggagtgcgtgtagcaggagtctgagcccctcctccagcctgagaagtggctggtgctacaggaagcaaacctgttcgggtgactctctccataaggcccaccaatcgaaccagggcgtcctgaagaactggggtggcaatgaaaccctctgggacctgagctgggcccaccggagctgctggagctggaacctcctcatcataatcaacatgaggctccacctctggaactgctgctcggggctgagctctgcccctgcctcggcctctgggcctcggcctcgccctctgcccctaataggagctgctgctgggggctcgggctgctgcgcggtcgatgaggaagcgcgtgtcctcgccatctgcgaaagaacggagtagaaattcaatcagtattggggaaacagaaccgcacgacaagaaagaacagatgtgaagttttcctaactcagtagcctctgcgggataaatacagacgtctccgtaccgatccctcagactctaccgagcttgtccgtgagttgtgagacctaagtaacctagtgctctgataccaacttgtcacgacccggatttcccaccatcgggagtcgtgatggcgcctactattggagctaggccagccaagtattaaaacatttctgataacattcgcaacaatataaacaaaacgagacaattaaataaaagcggaagtcttaacttactagaaaactgaataaatgcggaaagtttaacataatcctctacccaagattggtgtcacaatgctcacgaacttctaagatttactaaatacaatcgtctgaaagaaaattataaactgtttgtttcggtacaaaagataacaaactgaataaagagagagagagactccgggcctgcggacgtcagcaaggctacctcggtgtctctggactgaagtcagctcccgatcaaatcctactgctgaggtccaaaagctgctcctggatctgtgcaaaaagatgcacagagtgtagcatcagcacaaccgaccccatgtgctggtaagtgcctggcctaaccccggcgaagtagtgacgaggctagacaggacctaccaaaaacaacctgtgcagatatatgcaataaaaggaaatatacagaatttaaacagctaagaggggggagcatgctatggggagctaacagtttcaaatagaaatcctcaataacagaaagaagtaacaaagccagaatgtcaacaagaatcaaaaatcaacaatttgcacggcatcacccttcgtgcttttactctcgtcctcaccaaaacaatacacggcatcacccttcgtgctttacgctcttcctcacccaaacaacaatcacaaggcaaatagggtaaggaaatctataacctcgaagtaaatcaaataagaacaagtaatgaaagaaacaacataactcggatatcaacaaagaatcagaaagcaacaaatgcacggcatcacccttcgtgcttttactctcgtcctcaccaaagcaatcatataaataaaatatgcacgacacccttcgtgcttttactctctttcctcaccatataatcaataaaatcggcacggaatggtacatcgtgcggcacacatcacccttcgtgctttacactctttcctcacaatagcaaacaatgcacgacatcacccttcgtgctttatcactcttcctcacccaagcaacaatcacaaacaaggggcaagggagtagacaaataatgatagaaatcccggcaagggaatacaaataaacagctaactcccggcaagggagcacaattaagcagttaaaaacccggcaagggaacaatatcaataatctcagcatcccggcaagggagatagtcaacaaagcaacaagcatcccggcaagggagcaattcaataattctttctctttctttcacttttacctcttatctcactttaccacctgagccaacgctccaaaggggttcaatcatttcatatactttcacgctttatgatatactcgagccaatgctccaagaatgtacaaatcataattcttcctcaaactcttcacattatatgaaatttatcaatttaacaaggaagaggtatcacaaaatccgaataaactgaattataaaggaaaggcggtatttgagggttgattgctattctttggaccgatgtaagtgtttgttctaactttgacttgagggaataggattaaagtgttgtttgctatttgctaattgttgagtacggtgtataggcatggtgacgagtatctatacaccgaagtctagcatgaccgtgagtcttattccgactccgaaacaacgatatctaggcataattaattcaataatatcaataaagactcgataacaaaatcccatagcttagatatgaagttcctagcattcttccaaaaataccaaaattcgaccccgggcccacatggtccaaacacgaggttcggaccaaaaccatatcacccattcatccacgagcccgaatatataattttttcaaattcgaccccaaaacgaggtccaaatcaagaaaaagtaaaaagccctaactctacccactcccccaatttctaccctaaattacatgttttaggccaagaaattcaatagatgttgatgaaaatggaagagaataagttaaagattactaacccaagagtttatggtgaaagaatgcttcaaagatcgccctagaactttggagaagaaagagtttgtgaaattttgtaagaatcccgtaaggctactgttctggattttaaaatttaactgggcgaatttggcctatgcgatcgcggacaaaggagtgcgatcgcatagagtaaatgggacagggctctgcgatcgcgaatgacactatgcgatcgcataaaggaaatagtgaaggctggctaacacactgcgatcgcagaggaaataatgcgatcgcgtagagcaaaatataggacctctcaggctaactactaactatgcgatcgcatagaacaaactaaaaccctgaaaatttacactatgcgatcgcggacatagctatgcgatcgcatagcacaaaagactggacaccagcagacagcagttctgcaatttttctaagtctaaaaccattccgaaacaaacacccgagccctcggggctcctaaccaaacacatgcactaactcaacaacatcatacgaacttatccgtgcgatcaaatcgcctaaataacttcaaaaacaatgaatcaaacctcaaaatcaagagtttttctcaaacttcatcaagtttcaaatttaggaattcaagtccgaatcacgtcaaacgacgtccgatttcaaccaaatttcacagaaagcgcttaaaccacatataagacctgtaccgggcgccggaaccaaaatacgggcccgataccaatgctttctaattcatttttatttcaaattttcatattaaatttcagaaaacaatttcttttaaaaattcatttctcgggctcgggacctcggatttcgattccgggcatacgcccgagtcccatatttttctacggaccctccgggaccgtcaaatcacgggtccgggtccgtttacccaaaatgttgaccaaagtcaactttaaccattttaaagccacaatttatcaaatttcacataatttaacacataagcttttccggctacgcgcccggactgcgcacgcaaatcgaggcaactaaaggtgaggttttcaaggcctcggaagcacgaaaaagggagaaaaccggtgatgaccctttgggtcgtcacattctccacctctaaaacaaccgttcgtcctcgaacggacataagaaggaagtacctgagtcggggaaaaggtgaggataacggtcccgcatatcggactcggactcccaggtcgatgcctcaggaggctgacctctccactgaacacgaaccgaaggaaaactcttcgacctcaactggcgaacctgccggtctagaatagctaccggctcctcctcataagataagtccttgtccaactggacagtgctgaaatctaacacgtgggatggatcgccgtgatatttccgaagcatggacacatgaaacactggatgtacggctgataagctcggtggcaatgcaagtctataagccacctctcccactcgatcaagaatctcaaatggaccaatgaacctagggctaagcttgcccttcttcccaaatctcatcacgcccttcataggcgacactcggagcaatacccgctcaccaaccatgaaagccacatctcgaacctttcgatctgcatagctcttttgcctggactgagctgtacgaagcctatcctgaatgatcctgaccttgtccaagcctcctgaaccaaatctgtacccaacaaccgagcctctcccggctcaaaccatccaaccggagatcgacatcgcctaccatacaaagcctcataaggagccatctggatactcgactggtagctgttgttgtaggcaaactctgctaaaggcaagaactgatcccacgaacctccaaagtcaatgacacaagctcggagcatatcctccaatatctgaatagtccgctcggactgcccgtccgtctgaggatgaaatgttgtactcaactcaacctgggtgcctaactctcgctgactgctttccagaaacgcgaggtaaactgcgtacctcggtccgaaatgatagataccggcacaccatgaaggcgaacaatctcccggatatagatctcagctaacctctcggatgaataggagactgccacaggaatgaaatgcgctgacttggtcagcctatcaacaatgacccaaactgcgtcgaacttcctccgagtctgcgggagcccaacaacgaagtccatagtgatcacttccactccaaaaataaaccaccaggcctctgatgctcatacttaacctgctgacaattcaaacaccgagccacataggcaacgatatccttcttcattctacgccaccaataatgctgccgcaagtcctgatacatcttcgcggcgcccggatgaatagagtaccgggagctatgggcctcctctaaaatcaactctcgaagcccatccacattaggcacacaaactcgaccctgcaatctcaaaactccatcagcatctaaggtaacctgcttggcacctccacgctgtaccgtgtctctaaggacacacaaatggggatcatcaaactgccgatcacggatacgctccaataacgaagaacgagcgaccgtgcaagctaatactctactaggctcagaaatatccaacctcactaactgattggccaaagcctgaacgtccaaagcaagcggtctctcaccgaccggaatataagcaagactgcccatactggctgacttcctactcaaggcatcggccaccacattggcctttcccgggtgatataggatagtgatgtcataatctttcaacaactccaaccacctcctctgcctcaaattcaactccttttgcttgaacaaatactgaagactcttatgatccgtgaacacctcacacgccacgccatacagatagtgcctccaaatcttcaatgcgtgaacaatggctgccaactccaaatcatgcactggatagttcttctcatgaaccttcaactgcctcgaagcataggcaatgaccttgccatcctgcatcaacactgcaccaagtccaatacgagatgcatcacaatagactgtataaggccctgaacctgtgggcaaaaccaataccggtgccgtagtcagagctgtcttgagcttctgaaagctcgcctcacactcgtccgaccatctgaactgggctcccttctgggtcaacctggtcatcggggctgcaatagatgagaacccctccacgaaccgacgatagtaacctgctaaccccaagaaactccgaatctctaggctgatgctggtctaggccagttcttgactgcctcaatcttctttggatcaacctgaataccctctgctgatacaacatgacccagaaatgcaactgagctcaaccagaactcacacttcgagaacttagcatataactgactatccctcaaggtctgaagaaccactctaagatgctgctcgtgctcctcccggctgcgggaatatatcaaaatatcatcaatgaagactatcacgaacgagtccaaataaggcctgaacactcggttcatcaaatccataaaggctgctggggcattggtcaacccaaatgacataaccaagaactcataatgcccgtaccgagtgcggaatgctgtcttagggacatcggatgccctaatcctcaactgatggtagccagatctcaagtcaatctttgaaaataccttggcaccctgaagctgatcgaacaaatcatcaatcctcggcagtggatacttattcttaattgtaaccttgttcaattgccggtaatcaatgcacattctcatcgagccatcctttttctttacaaacagaaccggcgcaccccaaggcgatacgctgggtctaatgaaacccttctcaagcaagtcttgcaactgctctttcaactctttcaactctggcggggccatgcgatatggcggaatagaaatgggctgagtgcccggagccaaatcgatgcaaaaatcaatatccctatcgggtggcatccctggcaagtctgatgggaaaacctcaggaaactcacgaaccacgggcacagaatcaatagagggaatctcagcactggaatcacgaacataagccaagtaggccaaacaccccttctcgaccatacgccttcacatagaaataacaggggagtctccctctccactctaaggggcaaatccggtaaggctaaagtcacagtcttggcatgacaatccaagatcgcatgatacggggacaaccaatccatccctaatataacgtcgaaatccaccatatctaagagcaacaaatcaacacgggtctcaagtcccctaaacaccacaacacaggaacgatgaacccgatcaaccactatagaatcacccactggtgtagatacatacacaggaatactcaaggcctcactaggcataaccaggtagggtgcaaaataggacgacacatatgaatacgtagatccagggtcaaatagcactgaagcatctctatcacagaccaaaatagtacctgtaataacaacatcggatgactcagcctctggcctggctggcaaagcataacatcggggctgggccccacctccctgaatcacatccctgggacgatcggctgctggctgacccctacctctggcggtctgagctccacctctatgacctctacctccacctctatgtcctctacccccgcctctagctggctgggcaggctgtggagcaactggtgcctgaatcataggacgaggaccctgctgctgagaactacccgaagctcgagggcaaaacctggcaatgtgacccatatcaccacaagtgtaacaagccctcggctgctgagactgctgaccctgtcgcctgaatgaccacctcggaaactctgaagcggcggtgcactgatgggagctggtggtgcactgaaggactgctgatccaaataatgcgtctgagaaccacgaccacctgagataccatgtgatacctggagagctgactgaaagggcctaggaggatggcctctaccatacgaatctctacctccagacgaggtaccactgaatctgcctgaatgacggggcctcttatccgacccatgaccacctccctgtgacagaaccatctcaactctgcgggccacattggccgcctcctgaaatgtgatctcgctcccggcctccttggccatctgaagacgaatcggcagaataagaccatcaataaaccttctcaccctctctctctcggtgggaagtatgatgagagcatggcgagctaaatcgatgaacctggtctcatactgggtaacagtcatagaaccctgctggaggcgctcaaactgcctccgataggcctctctctgagtaacggggagaaacttctctagaaacaacactgtaaactgctcccaagtcaaagatggcgatccggctggtctcgctaagcaataatccctccaccaagtcttggcggatccagacaagcgaaatgtagcaaaatcaaccccattggtctcaacaatacccatgtttctgagaacctcgtggcagctgtctagataatcctggggatcctcagtagatgcaccggcaaaagtagaagtgaagagcttggtgaacctatccagtctccacaaagcatcggcggacatagccgctccatcgccggtctgagctatggcacccggctgaactaccccaactggctgaaccgctggagtctgaatctggggagctacctgctccggagtgcgtgtagcaggagtctgagcccctcctccagcctgagaagtggctggtgctacaggaagcaaacctgttcgggtgactctctccataaggcccaccaatcgaaccagggcgtcctgaagaactggggtggcaatgaaaccctctgggacctgagctgggcccaccggagctgctggagctggaacctcctcatcataatcaacatgaggctccacctctggaactgctgctcggggctgagctctgcccctgcctcggcctctggcacggcctcgccccctctgcccctaataggagctgctactgggggctcgggctgctgcgcggtcgatgaggaagcgcgtgtcctcgccatctgcgaaagaacggagtagaaattcaatcagtattggggaaacagaaccgcacgacaagaaagaacagatgtgaagttttcctaactcagtagcctctgcgggataaatacagacgtctccgtaccgatccctcagactctaccgagcttgtccgtgagttgtgagacctaagtaacctagtgctctgataccaacttgtcacgacccggatttcccaccctcggggtcgtgatggcgcctactaataggagctaggcaagccaacttaaattaccttccgtttaacacacattcttttccataattatcaacatgtaataaaggcaacataattaaaaatttcaagcggaagtcttaacttatataaaaactgaatagaaatgcggaaagtttaacataatcctctacccaagattggtgtcacaatgctcacgaacttctaagatttactaaatacaatcgtctgaaagaaaattataaactgtttgtttcggtacaaaagataacaaactgaataaagagagagagactccgggcctgcggacgtcagcaaggctacctcggtgtctctggactgaagtcagctcccgatcaaatcctactgctgaggtccaaaagctgctcctggatctgtgcaaaaagatgcacagagtgtagcatcagcacaaccgaccccatgtgctggtaagtgcctggcctaaccccggcgaagtagtgacgaggctagacaggacctaccaaaaacaacctgtgcagatatatgcaataaaaggaaatatacagaatttaaacagctaagaggggggagcatgctatggggagctaacagtttcaaatagaaatcctcaataacagaaagaagtaacaaagccagaatgtcaacaagaatcaaaagtcaacaatttgcacggcatcacccttcgtgctttacgctcttcctcacccaaacaacaatcacaaggcaaatagggtaaggaaatctataacctcgaagtaaatcaaataagaacaagtaatgaaagaaacaacataactcggatatcaacaaagaatcagaaagcaacaaatgcacggcatcacccttcgtgcttttactctcgtcctcaccaaagcaatcatataaatgaaatatgcacggcatcacccttcgtgcttttactctctttcctcaccatatcaatcaatcacggcatcacccttcgtgctttacactcaatttcatcacatcagtgctttacactctttcctcacaatagcaaacaatgcacggcatcacccttcgtgctttatcactcttcctcacccaagcaacaatcacaaacaaggggcaagggagtagacaaataatgatagaaatcccggcaagggaatacaaataaacagctaactcccggcaagggagcacaattaagcagttaaaaacccggcaagggaacaatatcaataatctcaggcaagggtcaacaatagcatcccggcaagtgatacctcttccttgttaaattcataactttcatataatgtgaagagtttgaggaagaattatgatttgtacatttttggagcgttggctcgagtatatcataaagtgtgaaagtataatgattgaacccctttggagcattggctcaggtggtaaagtgagataagaggtaaaaatagaaagaaagagaaagaattattgaattgctcccttgccgggatgcttgttgctttgttgactatctcccttcccaggatgcttgttgctttgttgactatataccttgccagaatgcttgttgctttgttgactatctcccttgccggaatgctgatattattgatattgttcccttgtcgggtttttttaactgcttaattgtgctcccttgccgggagttagctgtttatttgtattcccttgccgggatttctatcattatttatctactcccttgccccttgtttgtgattgttgcttgggtgaggaagagtgataaagcatgaagggtgatgtcatgcattgtttgctattgtgaggaaagactgtaaaacacgaagggtgatgtcatgccgcacgatgtaccactcggtgccgattttattgattatatggttaggaaagagagtaaaagcacgaaggatgatgctgtgtatatttcatttatatgattgctttggtgaggacgagagcgtaaagcacgaagggtgatgcagcgtatttgttgctttttgattctttgttgatattcgagttatgttgtttctttcattacttgttcttatttggtttacttcgaggttatagatttatttaacctatttgccttgtgattgttgtttgggtgaggaagagcgtaaagcacgaagggtgatgccgtgtattattttggtgaggacgagagtaaaagcacgaagggtgatgccgtgcaaattgttgacttttgattcttgttgacattctggctttgttacttctttcagttattaaggatttccatttgaaactggtagctccccatagcatgctcccctctcttagttgtttaaattctgtatatttccttttattgcatatatctgcacaggttgtttttggtaggtcctgtctagcctcatcactacttcgtcgaggttaggccagacacttaccaacacatggggtcggttgtgctgatgttacatctgtgcatctttttgcacagttccaggagcagcttttggacctcagcagtaggatttgatcgggagctgacttgagtccacagacaccgaggtagccttactgatgtccgcaggcccggagtctctctctctctctattcagtttgttatattttgtaccgaaataaacagtttataatttactttcagatgattgtatttagtaaatcttagaagttcgtgagcattgtgacaccaatcttggatagaggattatgttaaactttccacatttctattaagtttttatataagttaagacttccgcttgaaattttaattatgttgcctctattacatgttgataattatggaaaggaatgtgtgttaaacggaaggtaatttaagttggcttgcctagctcctattagtaggtgccatcacgaccccgatggtgggaaattcgggtcgtaactttgtgattttactttctcaagcaattcaatatcttctagagcttgatgtgacctattgatgtttttggtggtgacataacttcttttatcatgtttgaagaaaaattattaaatgagataaagtggttgtaagatggttaattagagtaaaataacaatggacgaggaacataatctcgttacctatactcaatcataaaaataagaaagaattttacctcttcccttttttttgtaccagcaagtgaagctccaaggcaagctttgtatagacaaaaagagaagaaaacttgttatgctttaggaaccactttcttcttactgttaccaagtagttatgctctaggaactctttctttttactgtaccatgtaagaatatttatagaagataaatggccatccagttccctctgcaagcaaaaaaacttgaaagtacctaacttatttaactaaattctggagccaaagcgaagcctaacttactgactaaaatcattgggaatacagtttggtgttgaatttattaaacatctcctaatgctgaacttgatcatccatctcctgtaacatgcatattcacagaaagaggcttctatgaatgctacaataatatctatgaatactacaataatatatgaaaattataatgatcgaacagtcggattaagcatctacttaactgatataagaaaaataaagtatattaattagaagaaattcaaggcaatattcagttactcatcgtgaaagacctttgctatgaggctttatttagcttggactttatgccaattactatttctttttatcctttttctctttttttatatttaagtagatttagaatatatacttttcaacaccaaatctcattagattctgacattagcttctaatcctctatcatacttttcttaatcaagagaatnnnnnnnnnnnnnnnnnnnnnnnnnnnnnnnnnnnnnnnnnnnnnnnnnnnnnnnnnnnnnnnnnnnnnnnnnnnnnnnnnnnnnnnnnnnnnnnnnnnnnnnnnnnnnnnnnnnnnnnnnnnnnnnnnnnnnnnnnnnnnnnnnnnnnnnnnnnnnnnnnnnnnnnnnnnnnnnnnnnnnnnnnnnnnnnnnnnnnnnnnnnnnnnnnnnnnnnnnnnnnnnnnnnnnnnnnnnnnnnnnnnnnnnnnnnnnnnnnnnnnnnnnnnnnnnnnnnnnnnnnnnnnnnnnnnnnnnnnnnnnnnnnnnnnnnnnnnnnnnnnnnnnnnnnnnnnnnnnnnnnnnnnnnnnnnnnnnnnnnnnnnnnnnnnnnnnnnnnnnnnnnnnnnnnnnnnnnnnnnnnnnnnnnnnnnnnnnnnnnnnnnnnnnnnnnnnnnnnnnnnnnnnnnnnnnnnnnnnnnnnnnnnnnnnnnnnnnnnnnnnnnnnnnnnnnnnnnnnnnnnnnnnnnnnnnnnnnnnnnnnnnnnnnnnnnnnnnnnnnnnnnnnnnnnnnnnnnnnnnnnnnnnnnnnnnnnnnnnnnnnnnnnnnnnnnnnnnnnnnnnnnnnnnnnnnnnnnnnnnnnnnnnnnnnnnnnnnnnnnnnnnnnnnnnnnnnnnnnnnnnnnnnnnnnnnnnnnnnnnnnnnnnnnnnnnnnnnnnnnnnnnnnnnnnnnnnnnnnnnnnnnnnnnnnnnnnnnnnnnnnnnnnnnnnnnnnnnnnnnnnnnnnnnnnnnnnnnnnnnnnnnnnnnnnnnnnnnnnnnnnnnnnnnnnnnnnnnnnnnnnnnnnnnnnnnnnnnnnnnnnnnnnnnnnnnnnnnnnnnnnnnnnnnnnnnnnnnnnnnnnnnnnnnnnnnnnnnnnnnnnnnnnnnnnnnnnnnnnnnnnnnnnnnnnnnnnnnnnnnnnnnnnnnnnnnnnnnnnnnnnnnnnnnnnnnnnnnnnnattctgatgaaaattactaaccctttatcccacttttcttaatgagatttagaatatttttcgacaacataactcgtaagatttcaatagaaagatcaaattatttcttctacaaaaaattgtgaaacttctaaatctgagcaggtaaggaggacagggcactgctaaaacttttctcaaaccagggtcggctccatagtgatgagaggtaaaggcatgtgccttaggcccccaaatttgggggtcccattttaaaaaaataataagttcataagtattttaaaaataatatttaatatttttaatacaaaaatagagtatttaatataaaagaaaagaaaactttttagatatataaatgaggtaataatttgacttacttaaaaataggtagatgaatactttttccaattttttactttttcactttttacttctttaaaaatttgctctctcttccttaatttgtccaagtcactctttcttttttctaatctcttcatatctcggaaaatcctatatattttctgtctttctatgtgatattcttactcactttctttcttcaagatttcattactcacctttttctcaaagatgtcattagttcaagtgttcaacaatacttttaagttttcaatagttctatacttctattgctctgtaaaatctcatctaatatcagcaatatctcaagaaagattaaataagctagttatgttatcaattgaacatgaactattagagaaaatcgattataaaagaattattaacaattttgtatctcaaaaagttagaagaataaacttcaaataaaaagatatcttataacttttttttaaaaaaaaattaggcctcatattaaactatggctttaggccccgtatgtgcttgagctgcccctgcctcaaacatcaaaacaccaatccattaaaagtctataaaagatattaaaagaagcaacattggactacatgaaaatcttaaaattgttctactatatcaaagcacaattaacctcaaactctcaaagaatctgaagatatctctgatttattttgataaaaattgtctataatgagacacatccacaataaaaacacaaatctagcaaaaaattacaactaattacatttgttcttattaacaataatgcacaaaaatgtagacaacatataagtcaaaagcatgagtatgatgaattaattttggtagtaacaattatatttaacccataaaatttatcttacgctggatgaaaaaatacaacaaaatatgcgaattgagttcaccttggcgtgtgaaactaacaaaacctaaggtgaattagtggagaatacatcatgtagttctgcaactgattttgtaggagaaccaaaaacaaattaacaaaaaggatgtactccaagttgcttcaataattgtgacgacccggatttctcaccctcgggagtcgtgatggcgcctactaatgtgagctaggcaagccgactgtttgaactaattacctttttaccccttttatattctttaacaattttaaagcaataaagtgtagacaacggaatttacaataagcggaagaaaagcaatgaactatctaaatatgtatccaatacaaccgcttgaacctcgactacccagaactggtgtcacagtttcacagacggtctaagaatactatatacaaagtctgaaagataaaagatacactgattctgaaataagtaaaggaaacaggataaagaaaagataggaggtgatgccaaggcccgcggacgtttgcaggactacctcgggtcacctgtgtgaactgaagacagcaccctcactacggtccaagcgctccggaatcagtatctgcacacagtgtagagtgtagtataagcacaaccgaccccatgtgctggtaagtgcctagcctaacctcggcgaagtagtgacgaggctaggaccagactaccaaataaacctgtgcagttaaatcatatacaacggaaatataaaagcagataattacatttaaagatgggagggggaaacatgtttcggggaataacagacaacaacagaatatcaagaggaatataaataaaccaaaatccaattactaacaaggataaggaaaacaaatgcagaattcactttcatttcacatcttgttgtaggcgtgcaacccgatcccatttcatatatctcgttgcaggcatgcaacccgatcccatttcatatatctcattacaggtgtacaacccgctcccatttcatatatcttgttgcaagcatgcaaccccttcctatttcatatatttccgtggtggcgtgccacccgatcccatttacaaatcaataataatcacaaaagaatcctggcaagggaacaagagcaatatagcatcatcccaacaagggaacaataatattttaacaacatcctggtaaggaaacaataatatcaaaacaaacatcccggcaagggaacaataataataataacatccgggaaagggaacaatattggtaatcctcatatgaaatacaataaaccacaacgtgtcataacaattacaatacaagactcacgggcatgcttgacaccaacgtatagatactcgtcaccatgcctatatgtcgtactccacagttacctcatagaaaataagacacgactcctaatccttcaagctaaggttagacaaaacacttaactcgatgccacgaacacaattcaagtctcaattattgctttacctcttgatcccaccaccaattcgctcgtatctagccacaagttacttaattacgtcaataaatgctaaatgaattaattctaatgtatgaaaataagttttccaaaggtttacccaaaaagtcaaaaatcgctctcggacccacatggtcaaaattcgaggttcgaaccaaaacccggctacccattcccctaagaacccaaatatataatttgttttaaaatcggacctaaaattgaggttcaaatccccaatttttaaaaaatctaggttctaccaaaaacacctaattttccccatgaaaattattgattttgagttgaaatcatgtgaaaagatgttaacgattgaagaaaacgacttaaaattgacttacaatcgatttggaagaagagttgtctttgaaaattgcccaagggtgttttggttttgaaagactgtgaaaaatgaaagattttcggctaagttataaaattggaggttgcagatgttgcaattgcgacaagtgttcgcaattgcgaacccagacttctgctaagctcacatttgcgaagtggccctcgcatttgtgaggttggaattgtgaacatacaatcgcatttgcgataacaggcccaaatggggagtatcgcatttgcgaaggaaaaatctcgcatttgcgaagaagggctagcctgagatgtttcgcatttgcgactcagcctttgcatttgcgaaggaaaaatctcgcatttgcgaagaagggctatcctgggatgtttcgcatttgcgatgcgaagcctgcaggcctgcaatgaaacagctgaagcctgcaatttctcaagtccaaaatccaccccgtggcgtatccaaaactcacccgacccctcgggactccaaaccaaacatgtacaccaacctaaaaacatcatacggacttgcttgtgcattcaaatcaccaaaagaacgtcaacaactacgaatttagcatcaaaatcataaaatttcttaagaacatcaaatttcccaatttcctcaaataaggtccgattcatatcatatcaagtccgtttcttaccaaatttcacaggttcgactcaaatcatatataagacctataccggggtccggaacctaaatacgggcccgatactatcaaactttaaacacatttcactttcaaaaactcataaatattccagaaaataattttcttcaaaaattcaatgctcgggcttgggacctcagaattcgattttgggcattcgcccacgtcccatattttcctacggaccctccaggaccgtttacccaaaatgttgacagaagtcaacttaaatccattttaaagtcaaaattcatcatttttcacagattttcacataatggctttccgactacgcgatcggactgcgcacacaaatcgaggcaagacaaaaagaggtttttaaggccgcagaacacataattcatttttaaaacaagtgatgacccaaaaggtctacattctccacctctaaaacaaccgttcaccctcgaacggacataagaaggaagtacctgagtcagagaaaagatggggataacgccttcgcatatcggactcggactcccaggtcgatgcctcagcaggttgacctctccactgaacacaaatagagggaaaactcttcgatctcaactgacaaacctgccggtctaggatagctaccggctcttcctcataagacaagtccttgtccaactcacagtgccgaaatctaacacgtgagatgtatcaccgtgatacttccgaagcatggacacatgaaacactggatgcacggctgataagctcggtggcaacgcaagactataatccacctctcccactcgatcaagaatctcaaacgggccaatgaacctagggctaagcttgcccttcttcccaaatctcatcacgctcttcatnnnnnnnnnnnnnnnnnnnnnnnnnnnnnnnnnnnnnnnnnnnnnnnnnnnnnnnnnnnnnnnnnnnnnnnnnnnnnnnnnnnnnnnnnnnnnnnnnnnnnnnnnnnnnnnnnnnnnnnnnnnnnnnnnnnnnnnnnnnnnnnnnnnnnnnnnnnnnnnnnnnnnnnnnnnnnnnnnnnnnnnnnnnnnnnnnnnnnnnnnnnnnnnnnnnnnnnnnnnnnnnnnnnnnnnnnnnnnnnnnnnnnnnnnnnnnnnnnnnnnnnnnnnnnnnnnnnnnnnnnnnnnnnnnnnnnnnnnnnnnnnnnnnnnnnnnnnnnnnnnnnnnnnnnnnnnnnnnnnnnnnnnnnnnnnnnnnnnnnnnnnnnnnnnnnnnnnnnnnnnnnnnnnnnnnnnnnnnnnnnnnnnnnnnnnnnnnnnnnnnnnnnnnnnnnnnnnnnnnnnnnnnnnnnnnnnnnnnnnnnnnnnnnnnnnnnnnnnnnnnnnnnnnnnnnnnnnnnnnnnnnnnnnnnnnnnnnnnnnnnnnnnnnnnnnnnnnnnnnnnnnnnnnnnnnnnnnnnnnnnnnnnnnnnnnnnnnnnnnnnnnnnnnnnnnnnnnnnnnnnnnnnnnnnnnnnnnnnnnnnnnnnnnnnnnnnnnnnnnnnnnnnnnnnnnnnnnnnnnnnnnnnnnnnnnnnnnnnnnnnnnnnnnnnnnnnnnnnnnnnnnnnnnnnnnnnnnnnnnnnnnnnnnnnnnnnnnnnnnnnnnnnnnnnnnnnnnnnnnnnnnnnnnnnnnnnnnnnnnnnnnnnnnnnnnnnnnnnnnnnnnnnnnnnnnnnnnnnnnnnnnnnnnnnnnnnnnnnnnnnnnnnnnnnnnnnnnnnnnnnnnnnnnnnnnnnnnnnnnnnnnnnnnnnnnnnnnnnnnnnnnnnnnnnnnnnnnnnnnnnnnnnnnnnnnnnnnnnnnnnnnnnnnnnnnnnnnnnnnnnnnnnnnnnnnnnnnnnnnnnnnnnnnnnnnnnnnnnnnnnnnnnnnnnnnnnnnnnnnnnnnnnnnnnnnnnnnnnnnnnnnnnnnnnnnnnnnnnnnnnnnnnnnnnnnnnnnnnnnnnnnnnnnnnnnnnnnnnnnnnnnactgaccatgaatgccaaatctcgaaccttacgatcggtataacttttttgcctggactgagctgtatgaagcctatcctgaatgattctgaccttgtccaaagcatcctgtactagatacttacccaataaccgagcttcccctggctcgaaccatctaaccggcgaccgacaccgcctaccatacaaagcctcataaggagccatctggatactctactagtagttgttgttgtaggcaaactctgctaaaggcaaaaactgatcccacgagcctccaaagtcaattacacaagcttggagcatatcctccaaaatctgaatagtccgctcggactgcccgtctgtatgaggatgaaacattgtgctcaactcaacccgtatgctcatctctcgctgaaatgctctccagaaataggaggtaaattgcgtacctcagtatgaaatgatagacatgggcacaccatgaagacgaactatctcccagatatagatctcagctaacctgtcggaagaaaaggagactgccacaggaatgaaatgtgctgacttggtcagcctatcaacaataacccatactgcgtcgaacttcctccgagtttgtcggagtccaacaatgaaatccatagtgatccgctcccatttccactcgggaatctcaatcttctagaacaaaccaccaggtctctaatgctcgtacttaacctgctgacaattcaaacaccgagccacatatgcaacgatgtccttcttcattctcctccaccaataatgttgttgtaaatcctgaaacatcttagcggcacctggatgaattgagtacctggagctatgggcctcctctaaaatcaactatcgaagcccatctacattaggcacacaaacttgaccctgcaatctcaaaactccatcatcccgtaaggtaacttgcttggcacctccgtgctgcaccgtgtctctaaggacacataaatgaggatcatcatattgccgatctcggataagctccaacaaagaaaaatgagcgactgtgcaagctaacacacggctggggtcagcaacatccaacctcatgaactggttggccaaagcctgaacatccaaagcaagcggtctctcactgaccggaatataagcaagattgcccatactggctgacttcctactcaaagcatcggccaccacattggcctttcccggatgatataagatggtgatatcatagtctttcaacagctccaaccaccttctctacctcaaagttatctccttctgcttgaacaagtactgtagactcttgtgatccgtgaacacctcacatgccattccatatagataatgcctccaaatcttcaatgcgtgaacaatggctgccaactccaaatcatgaaccggatagttcttctcatgaatcttcannnnnnnnnnnnnnnnnnnnnnnnnnnnnnnnnnnnnnnnnnnnnnnnnnnnnnttgtcgcgaaacataggtgatgaccttgccatcctgcatcaacaccgcaccaagtccaacacgagatgcatcagaataaactgtataaggccctgaacctgtgggcaaaaccaacactagtgccatagtcaaaatgtcttgagcttctgaaagcttgactcacactcgtcagaccatctaaattgggcacctttctgggtcaacctggtcattggggctacaatagacgagaacccctccacaaaccaatgttaatagcctgccaatcccaagaaactccgaatctctggagctgatgctggtctacgctagtttttgactgcctcaatattcttcggatcaacctgaataccctctgcggatacaacatgacccaggaatgcaactgaactcaaccaaaactcgcacttcgaaaacatggcatacaactgactatccctcaaagtctaaacaaccactctaatatgttgctcatactcctcctggctacgggaatagatcaaaatatcatcaatgaagactatcacgaacgaatccaagtaaggcctgaacattcggtccaccaaatccgtaaaagttgctggggcatttgtcaacccgaatgacattaccaagaactcataatgcatgtaccgagtgtggaaagttatcttagggacatcggatgccctaatactcaactgattgtagccagatctcaagtcaatcttcaaaaataccttggcaccatgaagttgatcaaacaaatcatcaattctcggcaatggatacttattcttgattgtaaccatgttcaactgccggtaatcaattcacattcttatcaatccgtccttcttcttaaaaaacaccaccggcgcaccccaaggcgagacactaggtctaatgaagcctttttcaagcaagtcttgcaactgctccttcaactctttcaactcaggcnnnnnnnnnnnnnnnnnnnnnnnnnnnnnnnnnnnnnnnnnnnnnnnnnnnnnnnnnnnnnnnnnnnnnnnnnnnnnnnnnnnnnnnnnnnnnnnnnnnnnnnnnnnnnnnnnnnnnnnnnnnnnnnnnnnnnnnnnnnnnnnnnnnnnnnnnnnnnnnnnnnnnnnnnnnnnnnnnnnnnnnnnnnnnnnnnnnnnnnnnnnnnnnnnnnnnnnnnnnnnnnnnnnnnnnnnnnnnnnnnnnnnnnnnnnnnnnnnnnnnnnnnnnnnnnnnnnnnnnnnnnnnnnnnnnnnnnnnnnnnnnnnnnnnnnnnnnnnnnnnnnnnnnnnnnnnnnnnnnnnnnnnnnnnnnnnnnnnnnnnnnnnnnnnnnnnnnnnnnnnnnnnnnnnnnnnnnnnnnnnnnnnnnnnnnnnnnnnnnnnnnnnnnnnnnnnnnnnnnnnnnnnnnnnnnnnnnnnnnnnnnnnnnnnnnnnnnnnnnnnnnnnnnnnnnnnnnnnnnnnnnnnnnnnnnnnnnnnnnnnnnnnnnnnnnnnnnnnnnnnnnnnnnnnnnnnnnnnnnnnnnnnnnnnnnnnnnnnnnnnnnnnnnnnnnnnnnnnnnnnnnnnnnnnnnnnnnnnnnnnnnnnnnnnnnnnnnnnnnnnnnnnnnnnnnnnnnnnnnnnnnnnnnnnnnnnnnnnnnnnnnnnnnnnnnnnnnnnnnnnnnnnnnnnnnnnnnnnnnnnnnnnnnnnnnnnnnnnnnnnnnnnnnnnnnnnnnnnnnnnnnnnnnnnnnnnnnnnnnnnnnnnnnnnnnnnnnnnnnnnnnnnnnnnnnnnnnnnnnnnnnnnnnnnnnnnnnnnnnnnnnnnnnnnnnnnnnnnnnnnnnnnnnnnnnnnnnnnnnnnnnnnnnnnnnnnnnnnnnnnnnnnnnnnnnnnnnnnnnnnnnnnnnnnnnnnnnnnnnnnnnnnnnnnnnnnnnnnnnnnnnnngcggggtagaaataggctgagtgctcggagccaaatcaatgcataagtcaatatccttgtcgggtagcatacccggcaggtctaaaggaaatacctcagggaactcacgaacagcaggcacaaaatcaatagaaggaacctcagcactagaatcatgaacataggccaaataggccaaacaccccttctcgaccacacaccaagcctttacataagagataacactacgggtagaatgaccaggagtccctctccactctaaacgaggtaaacccgacaaggctaaggtcatagtctaggcatgacagtccaagatagcatggtaaggtgataaccagtccatccccaatatgacatcaaaatcaaccatgtccagcagaagcaaatctatacgagtctcaatacccccaatcacaactatacatgaatgatgtactcgatctaccgcaatagaatcacttaccggtgtagacacataaacaggagcactcaaagaatcattaggcatgaccagatacagtgcaaaataagatgacacataggagtatgtagatcctggataaataaaactgaagcatctctgctacaaactagaacagtacctgtgataattgcatcggaagccacaacctcgggcttggctggaagagcataacatcgggactgagccccaccaccctgaactacatctctgggatggcctgctactggctggcctccacctctagctacctgacctccacctctaatacctctacctccacctctaatacctctacctccacctctagcacctctaaccctacccctagctggtggagcaggcggttaaacacctggtgctagaaccatagtacgggaaccctgctgctgagaactgctcggtgctagagggcaatatctagcaatgtgcctcgtgtcgccacaagtaaaacaagcccctcgactgcttggtctgatgacactggaaactctgaagcggcgatgcagtgataggagttggtggtgcactataggactgttgatcagaatactgcatatgagaactacaactatctgaagcaccgtaagaaacttgaagtgctgactaaaaaggcctaggacgatggcctctaccatacgaatccttaccttcagacgaggtaccactgaatctgcctgaatgatgaggcctcttgtcagacccctgaccgcctccctacgatagaactatctcaactctcctggccacattggccacctcctaaaaagaaatgtcactccctatctcctaggccatctgaagtcgaataggctggataagtccctcaataaacctccttactctctctctctctctcggtgagaagtatgataagagaataacgtgccaagtcgatgaatatggtctcatactgagtaacaatcatagaaccctgctggagatgctcaaactgcctccgatagatctctctctgagtgatagggagaaaagtctccagaaatagctgagaaaactgctcccaagtcaaagctggcggtccggctggtctagccaagaaataatctctctaccaagtcttggcggatccagacgagcgaaaagtagcaaagtcgaccccaacagtctccattgtcaccatgttccgaagaacctcgtgacatctgcctaaatgatcctagggatcctcaaaagatgcaccgctgaaagtagtagtaaagagcttggtgaaacttatccaacctccacaaagcctctgaagacgtagctgatctatcacagatctgtgctgcttctcggctgaagaagaggtacgtgacctcgccattcgcgaaaggacaagagtaaagatttcgatttagcattgagagaacaaaaattgcatgacaggaaagaatagaagtgaagctttttcctaactttgtagcctctggggataaatacagacgtctccgtactgatcccttagactctactaagcttgtctgtgaactgttagacccatgtaacctagagctttgataccaacttgtcacgacccagatttcccaccatcgggagtcgtgatggcgcctactaacgtgagctaggcaatccgactatttgaaccaattacctttttaccccttttatattctttaacaattttaaatcaataacgtgtagacaacaaaatttacaataagcggaagaaaagaaatgaactatttgaatatgtatccaaaacaaatgcttgaacatagactacctagaactggtgtcacagtttcatagatggtctaaaaatactacataaaaagtctgaaagataaaagatacaatgtttttgaaataagtaaaagaaacaggataaagaaaagataggaggtgacgccaagccccgtggacgtctgtacaactacctcgggtcgcctgtgtggattgaagatagcaccctcaacgcggtccaatcactctggtatcagtatctgcatacagtgcagagtgtagtatcagcacaaccgaccccatctgctggtaagtgcctagcctaacctcggcgaagtagtgacgaggctaggaccagactaccaannnnnnnnnnnnnnnnnnnnnnnnnnnnnnnnnnnnnnnnnnnnnnnnnnnnnnnnnnnnnnnnnnnnnnnnnnnnnnnnnnnnnnnnnnnnnnnnnnnnnnnnnnnnnnnnnnnnnnnnnnnnnnnnnnnnnnnnnnnnnnnnnnnnnnnnnnnnnnnnnnnnnnnnnnnnnnnnnnnnnnnnnnnnnnnnnnnnnnnnnnnnnnnnnnnnnnnnnnnnnnnnnnnnnnnnnnnnnnnnnnnnnnnnnnnnnnnnnnnnnnnnnnnnnnnnnnnnnnnnnnnnnnnnnnnnnnnnnnnnnnnnnnnnnnnnnnnnnnnnnnnnnnnnnnnnnnnnnnnnnnnnnnnnnnnnnnnnnnnnnnnnnnnnnnnnnnnnnnnnnnnnnnnnnnnnnnnnnnnnnnnnnnnnnnnnnnnnnnnnnnnnnnnnnnnnnnnnnnnnnnnnnnnnnnnnnnnnnnnnnnnnnnnnnnnnnnnnnnnnnnnnnnnnnnnnnnnnnnnnnnnnnnnnnnnnnnnnnnnnnnnnnnnnnnnnnnnnnnnnnnnnnnnnnnnnnnnnnnnnnnnnnnnnnnnnnnnnnnnnnnnnnnnnnnnnnnnnnnnnnnnnnnnnnnnnnnnnnnnnnnnnnnnnnnnnnnnnnnnnnnnnnnnnnnnnnnnnnnnnnnnnnnnnnnnnnnnnnnnnnnnnnnnnnnnnnnnnnnnnnnnnnnnnnnnnnnnnnnnnnnnnnnnnnnnnnnnnnnnnnnnnnnnnnnnnnnnnnnnnnnnnnnnnnnnnnnnnnnnnnnnnnnnnnnnnnnnnnnnnnnnnnnnnnnnnnnnnnnnnnnnnnnnnnnnnnnnnnnnnnnnnnnnnnnnataagcgtgtgcagttaaatcatattcagcggaaatataaaagcagaaaattacagttaaagatgggagggggaaaaaatgcttcggggaataacagacaacaacagaacatcaagaggaatataaagtaaccaaaatccaattactaacaaggataaggaaaacaaatgtagaattcactttcatttcacatcttgttgcaggcgtgcaacacgatcccatttcatatatctcgttgcaggcgtgtaacccgatcccatttcatatatctcgttgcaggcgtgcaacccgatcccatttcatatatctcgttacaggcgtgtaacccactccattttatatatctcgttgcaggagtgcaacccgatcccatttaatatatctcgttgcaggcgtgcaacccgctcccatttcatatatctcgtttcaagcgtacaacccactcacatttcatatatctcgctgcaggcttgcaacctgctcccatttcatatatcttattgcaggcatgcaacccactcccatttcatatattttcgtggcgacgtgccacacgatcccatttacaaatcaagaacaatcacaaaagaatcccggcaagggaacaagagaaatataacaacatcccgacaagagaacaataatatcaaaacaaacatcccggtaaaggaacaataatatgacaataacatcccggcaagggaataataatgataataacatcccgccaagggaacaataatgataatcctcatatgaaacgcaatataccacaacgtgtcataacaattacaatacaagactcacgggcaagcttgacaccgacgtatagatagtcgtcaccatgcctatacgtcgtactccacaattatcacgtagcaaataaggcacgactcctaatccatcaagctaaggttaggcaaaacacttacctcgatgccacgaacacaattcaagtctcaattattgctttacctcttgattacaccaccaattcgctcgtatctagccacaagttacttaattacgtcaataaatgctaaatgaatcaattctaatgcatgaaaataagttttccnnnnnnnnnnnnnnnnnnnnnnnnnnnnnnnnnnnnnnnnnnnnnnnnnnnnnnnnnnnnnnnnnnnnnnnnnnnnnnnnnnnnnnnnnnnnnnnnnnnnnnnnnnnnnnnnnnnnnnnnnnnnnnnnnnnnnnnnnnnnnnnnnnnnnnnnnnnnnnnnnnnnnnnnnnnnnnnnnnnnnnnnnnnnnnnnnnnnnnnnnnnnnnnnnnnnnnnnnnnnnnnnnnnnnnnnnnnnnnnnnnnnnnnnnnnnnnnnnnnnnnnnnnnnnnnnnnnnnnnnnnnnnnnnnnnnnnnnnnnnnnnnnnnnnnnnnnnnnnnnnnnnnnnnnnnnnnnnnnnnnnnnnnnnnnntgtttacccaaaaagtcaaaaatcgccctcgggcccacatagtcaaaatccgaggttcgaaccaaaacccgactacccattctcctaagaacccaaatatataatttatattaaaatcggacctcaaatcgaggtccaaattcccaatttttaaaaaccctaggttctacccaaaacacccaattttcgccataaaaatcattgattttgagttgaaatcatatgaaaagatgttaatgattaaagaaaccgagttaaaattgacttacaatcgatttggaaaagagttgtctttgaaaaatcacccaagggtgttttggttttgagagagtgtgaaaaatgaaagattttcggctaagttatgcaattgcaggttgcagatgtcgaaattgcgaccagggttcgcaattgcgaacacagacttctgctaagctcgaattggccaagtgaccctcgcatttgcgaggtcggaattgcgaacatacaatcacatttgcgataacaggcccaaatggggagtatcgcatttgcgaaggaaaaatctcgcatttgcgaggaaaggctggcctgggatgttttgcatttgcgagtcaggcttcgcaatgcgaagcctgcaagcctgcaatgaaacagctgaagcctgcaatttctcaagtccaaaatccaccctatggcgtatccaaaactcacccgagcccttggggctccaaaccaaacatgcacaccaacctaaaacatcatacatacttgcttgtacattcaaatcactaaaagaacgtcaacaactatgaatttaacatcaaaatcatgaaatttcttaagaacatcaaatttcccaatttcctcaaattaggtccgattcatatcatttcaagtccgtttcttaccaaatttcacaggttcgactcaaattatatataagacctataccggggcccggaactaaaatacgatcctgatactatcaaactttaaacacatttcactgtcaaaaactcataaatattccagaaaataattttcttcaaaaattcatttcttgagcttaggaccttggaattcgattccgggccttcgcccaagtcccatattttcctacggaccctccgggaccgtcaaattacgggtccgggtccgtttacccaaaatggtgaccaaagtcaacttaaatccattttaaagtcaaaattcattatttttcacagattttcacataatgactttacgactacgggcccggactgcgcacgcaaatcgagccaagacagaaagagttttttaaggcctcgaaacatagaattcatttttaaaacaagtgatgataggtcatcacaataacaaacaaaagtcaataacattagctagactccacaaactttaattgaaaaacattagagctaattccagcaaagtttgacatccgcaacagggaaacaaaatgaaaatcttttactacctatggaattgagaattcgttatgatagtaatcttgagaataaactaaagaagttattgttcagttcctttcttgaagtttagaaatatcactattgatatgttgccatatcagattcaattttgttaggcagcagttccctgatgcaccttcttatcagctacgtcggggggggggggggggggggnnnnnnnnnnnnnnnnnnnnnnnnnnnnnnnnnnnnnnnnnnnnnnnnnnnnnnnnnnnnnnnnnnnnnnnnnnnnnnnnnnnnnnnnnnnnnnnnnnnnnnnnnnnnnnnnnnnnnnnnnnnnnnnnnnnnnnnnnnnnnnnnnnnnnnnnnnnnnnnnnnnnnnnnnnnnnnnnnnnnnnnnnnnnnnnnnnnnnnnnnnnnnnnnnnnnnnnnnnnnnnnnnnnnnnnnnnnnnnnnnnnnnnnnnnnnnnnnnnnnnnnnnnnnnnnnnnnnnnnnnnnnnnnnnnnnnnnnnnnnnnnnnnnnnnnnnnnnnnnnnnnnnnnnnnnnnnnnnnnnnnnnnnnnnnnnnnnnnnnnnnnnnnnnnnnnnnnnnnnnnnnnnnnnnnnnnnnnnnnnnnnnnnnnnnnnnnnnnnnnnnnnnnnnnnnnnnnnnnnnnnnnnnnnnnnnnnnnnnnnnnnnnnnnnnnnnnnnnnnnnnnnnnnnnnnnnnnnnnnnnnnnnnnnnnnnnnnnnnnnnnnnnnnnnnnnnnnnnnnnnnnnnnnnnnnnnnnnnnnnnnnnnnnnnnnnnnnnnnnnnnnnnnnnnnnnnnnnnnnnnnnnnnnnnnnnnnnnnnnnnnnnnnnnnnnnnnnnnnnnnnnnnnnnnnnnnnnnnnnnnnnnnnnnnnnnnnnnnnnnnnnnnnnnnnnnnnnnnnnnnnnnnnnnnnnnnnnnnnnnnnnnnnnnnnnnnnnnnnnnnnnnnnnnnnnnnnnnnnnnnnnnnnnnnnnnnnnnnnnnnnnnnnnnnnnnnnnnnnnnnnnnnnnnnnnnnnnnnnnnnnnnnnnnnnnnnnnnnnnnnnnnnnnnnnnnnnnnnnnnnnnnnnnnnnnnnnnnnnnnnnnnnnnnnnnnnnnnnnnnnnncacttgatatatttagctaaagaaaagaaataatgtcttaaatattaatatgttaggatttttttatcaacttcaagaaacaatattatttaccttgagattctccgatatgatctacgatgagtttatatctttgcatcctgagtggatgcaaggtgatagaagaactattatcccaatataatgtaggtgcttcctaccacgggaaatcataaagtaggacgcaaaaagaaggcaattaggaagcttttgggagagactatatctattcaaaattcagaggaaatagtcaaactcaactgaacaattgaaaagagaaactcggtagtggctaattatctaaagttctttctgaagtaatgcggataccaagcatacaaaatttataagtacaaaaattacctgtctttttcccctttagttctttttggttttcatttcttcttactctgttttctcctcctcttttccagccacctcttttactatcagccatgctcggattctcccactaacattgttccctccacccattttattttaattttattcaatttcttttagtttttttcacttgattcctcaagcatagtctattttttaaatttattttatccaaaaaatattcatgaaggttacatttgaaactcttcacactctttaacaggaggcaaaatattttttcataagtgctaaaaccaataaaaaaaaagttaatagtgctactgatatttagtattagttttgtattcacataatagaaacatccaaaatagaatagatgtcttggcgacatctactattgatcttaccaaatttaccgaagtgaaataaaaaggaacacattagtgtttaatcattcatatatcttctgatatggcatgtgaagagctcaagccatgctgtatctagaataatatcattataatcatgaggctacaataaaattgaaagcttactgggcaatcaatccaatggaaaatccacatcaaacgaaaacatttgaaaccataagcatgtgcaaaatgtgataaaagtcatatgtgcacttgcaggaatattttctccttttattcaaggagtcaatatatccatgctcgtgaattcctttatcttatcaaaaattgcagacaaataaaaataaacttctaggtatttttgtcttttatttaaatttttcctaattttattatcctgcacctcaagcaatatgaacgaattttcctactcaagcgctccattttggatgtagaggaaactaattctaagttttcataataatagtcagaaaaatcagaaggattttaagatagttgtactggataaagaatagctaaagctctgactacattagaggttattacgaacattgtatctgaagaattcacatgataatcaagcttcataagctcaagtttggctaaccaagaattctaaactaaaaatactaaacaggacttacatattatatattcttgttcgtggttctagtttcagcatcacccatatagtttcaggttttataattgcttcttccatttcttgttcaactatgattggaaacttcatttccttttatttctttcacccgcacttgttggaaacatatgttcctttttcaacataagataaaccaaaaagtctggcatgcatgttgtcataatttctccatattgattttttaaaattgaatttgaaacaattggtcctacagtttgtcacgaccccggttcgcgctccgtgaactatcgtgatgacacctagtctctacgacgaggtaagcctaaaatgcggaagataaaccaaatttgcggaagaaaataatttaaaacagaaatagagtaataaaatagtgtttaaaagtgtcgctcggcatacacaatattaactcttaaaaccaataaattttcccaaaacccggaaacccatgaatcacaagctaagagatacataagaagctctaactccaaaaatgtctaaccaaaaatggaatactgaagggctatactattacagaaagatagaaagggactcctcagtttggggacgcggaagatatacctcgaaatctctacagaagcgcctcgcctcaaggatgataagacagagtggaagtatctggatctgcacatgaaaacatatgcagaaggggcatgagtacaccacaacggtactcagtaaatgccaagcctaacctcggtcgggtagtgacgaggaaggtcagggccctactgaggtnnnnnnnnnnnnnnnnnnnnnnnnnnnnnnnnnnnnnnnnnnnnnnnnnnnnnnnnnnnnnnnnnnnnnnnnnnnnnnnnnnnnnnnnnnnnnnnnnnnnnnnnnnnnnnnnnnnnnnnnnnnnnnnnnnnnnnnnnnnnnnnnnnnnnnnnnnnnnnnnnnnnnnnnnnnnnnnnnnnnnnnnnnnnnnnnnnnnnnnnnnnnnnnnnnnnnnnnnnnnnnnnnnnnnnnnnnnnnnnnnnnnnnnnnnnnnnnnnnnnnnnnnnnnnnnnnnnnnnnnnnnnnnnnnnnnnnnnnnnnnnnnnnnnnnnnnnnnnnnnnnnnnnnnnnnnnnnnnnnnnnnnnnnnnnnnnnnnnnnnnnnnnnnnnnnnnnnnnnnnnnnnnnnnnnnnnnnnnnnnnnnnnnnnnnnnnnnnnnnnnnnngaacaacgataactagaacagagacaaaataatcacgaaaaggaaatacaactcaagacagagataacaaccggggtaccctccaggataccgtcctgtagtcccaattacatctaaccagtggatctcccgggatactgtctcgtagtccatcatatgtatttgaacgatctctcgggatcccgtctcgtagtctaactatcagtgcgtggggatctatcgaaattccgatccgtagtcccaaatataaatacccagtactggaagaatctaccatgtgcagtctcgtagttccatataactgtgcagggggatctaccggaatctcacatccgtagtcccaattaaacaaacaagggagatctactgacatcccacatccatagtcccaaataaacagacaaaggggataatccacatccgtagtcccaaataaacagacaagggggatctatcggaatcccatatccgtagtcccaatgtaaatacacagcagcaaaaggaaaatattcagaaatggcaaatttcatattaaggcaaacaagtaattctagcctagcatgctgcacagaattcaggtaaggcagtttgnnnnnnnnnnnnnnnnnnnnnnnnnnnnnnnnnnnnnnnnnnnnnnnnnnnnnnnnnnnnncaagtcacttagacatgctttcctaagctaacagcaggcttaatagtgcaagtaataaaaaacaggaaagaaatcatactagtaattacttaataaaaatcgaatttacaacaattagcacaagtatacactcgtcacttcacgtacaaggcatttcaattatcaaatacaccaaatcctaagggaaggtcccccacacaaggttagacaagccacttacctcgaaccggctcaataatcaatatgaaaccatgctcttggcatgagtactcgactctaaatgacccaaatctattcaattcaatatcataacgtaaataacacttcaagtaattgattctacaaagaaattctaagctaatacgcgaaattaagtaaaatgaccaaaacgtcactcgggcccacatcttggaatcgggtaaaatttatattttcagaaacctcgtaccctcacgagtctatacataacaagaatattgaaatcatagttcaattgacccctcaaatacccatgttaaggtctcttaatctcaagccctaattactcattttttccaaatttctcaccaccaattaggtctttaatcacatataaacgagttgtgaaatcaaaaatattacctccaagtgattcccgttgaatccctctttaatccccttcaaaaagcttcaaaatcgcccaaaaatggaggaacttaggctcaaaatcacggaataggcattttaaatcattctgccgaggcatttaaattcttcttcgcggacgcggtcaaagcctggcgttcgcgaagcacaaattgacgttgaccacttttccttcttcacaaatgcatccccttattcgcgaacgcgaaggctcagcttcccagctcatcgcgaacgcgtagttcaaagaccctagctcttcgtgaacgcgggacctccatcacgaacgtgaagtccataccttcagctccacatcctaacccttcgcgaatgcgagggtccattcgcgaatgcgaagaacaactggtctgcaacacacatagtagttttctgcaacttcaaacatcatgaaatggtccaattgaccacccgaaactcacccgaggccaccaagacctcaaccaaacttaccaacatatttcataacttcattcaaacttgttccaaccttcagaacacacaaaacaacatcaaaacacctatttttcatcggattcaaggctaagaattccaaaaactctaaaaatatgctttcgatcaaaaagtctatcaaacctcgtccgaatgacctgaaattttgcacatacgtcacnnnnnnnnnnnnnnnnnnnnnnnnnnnnnnnnnnnnnnnnnnnnnnnnnnnnnnnnnnnnnnnnnnnnnnnnnnnnnnnnnnnnnnnnnnnnnnnnnnnnnnnnnnnnnnnnnnnnnnnnnnnnnnnnnnnnnnnnnnnnnnnnnnnnnnnnnnnnnnnnnnnnnnnnnnnnnnnnnnnnnnnnnnnnnnnnnnnnnnnnnnnnnnnnnnnnnnnnnnnnnnnnnnnnnnnnnnnnnnnnnnnnnnnnnnnnnnnnnnnnnnnnnnnnnnnnnnnnnnnnnnnnnnnnnnnnnnnnnnnnnnnnnnnnnnnnnnnnnnnnnnnnnnnnnnnnnnnnnnnnnnnnnnnnnnnnnnnnnnnnnnnnnnnnnnnnnnnnnnnnnnnnnnnnnnnnnnnnnnnnnnnnnnnnnnnnnnnnnnnnnnnaaacactacggagctattccaacttctggaattacattctgaccctcagatcaaaatttcactatcgaaccggaaacttcaaaattcgacctttctacatttcaagcctaaattagctacagacctctaaaacacaatccgaacacgcccctaagcccgaaatcacccaacgaagctaacgaaaccattagatttcccttctgatgtcatctttgcactgttctgactacggtaaactttccaacacttaagctcttatttagggactaagtgtcccaaaactcttcgaaactcaaaaccgaacatcccgacaaatataaatagcagaaataaattcggggaaagcagttaatagcggatcagggcgttaattcttaacacgaccggccggatcgtcacacagttgttcttggacatgcttaacacacataatcttcattgaagatgaaacaattcaagttctttagatataaagagtaggagaagaaagctataaagagcatacatcgaaaataagaatactttgattccccaaagtattaattatatcccccaattggaagataccaaaaaatctcaaagtagctaaagaaattcaaagccctgctctgcagaactagtttgactactaaattaagtcagaaatatgaaaaagaattgatcaaccaattaaagatgaatattttatccatcaaactaacatcatctacagatgaagtagccatgaataagcaacctccccaacatgcctcaatatctcaaaagggcaaataaacctcagactcaacttctctttcttcccaaatctcataacgccctttataagagaaacccgaagcagaacccgctctccaaccatataggaaacaacactaaccttccggtctgcgtaactcttctgtctggactgggatgtacgaagtctatcctgaatcaccttaatcttctccaaagcatcgtgaactaagtttgtgcccaataatctagcctcacccagctcaaaccagcccaccggggatctacaccgcctaccatataaagccccatacaatgccatctaaatgctggactgatagctgttgttgtaagcaaactccgccaatagcaagaattgatcccaagaccctctaaactcaatcacacatgtatagagcatatcctcaagaatctgaatagtgcggtcggagtgtccgtccgtctgagggtgaaatgttgtactcaaccccacccgagtacccaactcatgttgaatggacctccagaaccgtcatgtgaactatgtacctttatctgaaatgatggatattagaataccatgcagacgaacaatctctcggatataaatctttgccaaccgctccaaagaataagtagtacacacaggaatgaaatgagtggacttggtcagccgatccacaatcacccaaataacatcgaactttctcaaagtccgtgggagcccaactacaaagtccatggtgatctgctcnnnnnnnnnnnnnnnnnnnnnnnnnnnnnnnnnnnnnnnnnnnnnnnnnnnnnnnnnnnnnnnnnnnnnnnnnnnnnnnnnnnnnnnnnnnnnnnnnnnnnnnnnnnnnnnnnnnnnnnnnnnnnnnnnnnnnnnnnnnnnnnnnnnnnnnnnnnnnnnnnnnnnnnnnnnnnnnnnnnnnnnnnnnnnnnnnnnnnnnnnnnnnnnnnnnnnnnnnnnnnnnnnnnnnnnnnnnnnnnnnnnnnnnnnnnnnnnnnnnnnnnnnnnnnnnnnnnnnnnnnnnnnnnnnnnnnnnnnnnnnnnnnnnnnnnnnnnnnnnnnnnnnnnnnnnnnnnnnnnnnnnnnnnnnnnnnnnnnnnnnnnnnnnnnnnnnnnnnnnnnnnnnnnnnnnnnnnnnnnnnnnnnnnnnnnnnnnnnnnnnnnnnnnnnnnnnnnnnnnnnnnnnnnnnnnnnnnccactttcactccgcaatctctatctgctgaagcaacccactcgatctctggtgctcatacttcacctactgacagttgagacaccgaactacgaatccaactatatctttcttcatacgcctccaccaatattgctgcctcaaatcctgatacatcttcgcggcacccggatgaatggaataccgcgaactctaggcctcctccagaatcaactcccgaagcccttcaacattgggtacacaaatacggccctacatcctcattaccccatcatcaccaatagtcacatctcttgcatcaccgtgctgaaccttgtccttgaggacaagcaaatgagggtcatcatactgacgttccctgatacaatcaaataaggaagaccgagaaaccacgcaatgtagaacccgactgggcttcaaaagatccaatctcacaaactggctggctaaggcttgaacatccatcgccataggcctctccgatgctggtaaataagcaaaactccctgcccaacgactcaaagcatcggccaccatattggccttgcctggtgatacaaaatagtgatatcatagtccttcagcaactctaaccacctcatcaggcacaaatttagatccttttgcttgaacatgtgctgcaagctccgatggtcagtctaaatctcacagggaaccccgtataaataatggcgccagatctttagggaatgaacaatggaagctaactcaaggtcgtggacagggtaattcctctcatgtaccttcaactgtctggacgcgtaggcaatcaccctaccatgctgcatcaacaccgctccaaggacaatcctcgaggcatcacaataaaccgtataagaccccaaacctataggcagtatcaaaattggggctgtggtcaaagctatcttgagcttctgaaagctcgcctcacactcctccatccactggaatggagcacccttttgggtaaacctggtcatgggggctgcaatcgatgaaaatacttccacaaaatgatggtagtaacccgccaagccaaggaaactgtggatctctatagctgaggatggtctggtccaactctgcacgacctctattttcctcggatccacctgaataccctcactcgataccacatggcctaggaatgccacggagtccaaccaaaactcacatttccagaacttagcatataacttctcctctcttagagtctgaagcatagtccttaggtgctgctcatgatcttcccgacaccgggaatacactagaatatcatcaataaagacaatgatgaacgattcaagatacaaccggaacacactgtgcatcaaatgcataaaggctacgggggcattggtcagcccaaatgacataacaaagaactcgtaatgactataccgagtcctgaaagcagtcttcgtgatatctggctcccgaatcttcaactgatggtaacctgagcgcaagtcaatcttagaaaacacccgtgcgccctgaagctggtcaaacagatcatcaatacaaggcaaaggataacggttcttcactgtaactttgttcaactagcgataatcaatacacatacgcatagaaccatcatttttcttaacaaacatgataggagcaccctaaggtgatacactaggccaaataaaacccttatcaagcaattcctgtaactgatccttcaactccttcaactcaggaggatccatgcaatacggaggaatataaatgggttgagtgcccggcaacatatcaatgccaaaatcaatatctctatcaagcggcatgcttggaagatcagctggaaacacatcgggaaaatcccgtactactgggactgaatcaactgaaggggtatcaatactgacatctctcacataagctaaatacgtgtcacacaccttctcaaccatatgctgagatttaagaaaagaaataaccctactgggagtgtgatctaaagtacccctccactcaacacgcggtacacctggcatagccagcgttatggttttggcgtgacaatcaagaatagcataatgaggcgacaaccagtccatgcccaagataacgtcaaaatctatcatactgagcaataataaatcggctctggtcccaaaaccactaagagcaaccaaacacgaccgataaatgcggtccacaataagagaatctcccataagagtagaaacgtaaaaaagaaaactcaaagaatcttgaggtacacccaaatgcggagcaaaataagaagacacataagagaaagtggagcctggatcgaatagaaccgatgcatctttgtgacaaaccagtataatacttgtgatgacagaatcagaggcaacaacctccgtacgtgtaggaagggcataatatctggcctggcctccccctctagggcgaactctaactccccgacctccacctctagctggctgggcaggtggggtagcaactggagctgtaaccatatcctgagaactctgcagggcacgctgtggctgagaagtctgtggaggtgcacccctcccaagtctggggcaatccctcaccatatggcgtgtgtcaccacactcannnnnnnnnnnnnnnnnnnnnnnnnnnnnnnnnnnnnnnnnnnnnnnnnnnnnnnnnnnnnnnnnnttgggaagacgtgggggctgtgactggctcaggctaggactgctggactgacctctgaaagcaccccgtagaggaggcgcgctagaaatcggaggtgcataataaggctcctgaggcctaggaggagctggaccactattggctgctgcaagagctgaatgaactcatataacccctaccatgatgacctgcagttggggcacgggcaccagaataatggcccgactctcgagacctcttggcctccctctcctctctttccctagcatgcataccctcaatcctcnnnnnnnnnnnnnnnnnnnnnnnnnnnnnnnnnnnnnnnnnnnnnnnnnnnnnnnnnnnnnnnnnnnnnnnnnnnnnnnnnnnnnnnnnnnnnnnnnnnnnnctgataaggaaaatccatctccaactcacgagccatgctagacctgatactaggaataagtagctcaataaactggtgaaccctctcgcgaacagtagaaaccaaggctggtgcatgtctagccaagctagtgtaacggacatcatactctgagatagtcatagcacccaggcgaaaatgctaaaactcagtgcgccacgcatctttgaggctttgaggaacaaactctattaagaatagatctaaaaactgggtccaagtcagcaaagaagcctcgtccggactgtctaactcataggtgtgccaccactcataggcggctcctcgaatttggaaagtagtgaaggaagccccgctcgattctgatatacccatggtacgaagaatgcggtatcactcctccagaaatcccaaggcatcatatgattctaacccactaaatacgggaggatcatacttcttgaacctctcaagtctccgctgctcatcctccgaagtcgatgccctatcctcgggttggcctggggctacaagaataatctctaggacctgatcaacgtgcactcgctgctcaggagtgcgggcagcaggagtctgtgctcctcccccggcctgagatatggctgcagcaagggaaagcaaccctgcctgagccaaagaggtgtacatgctcatgaactgcgctagagtctcctgaagtgctggagtagtagtagcaatatgcgtatcaggtgcctggactccagctggaactgctggtggtacctcggcggtagctcgcgcaggtgctctggctacaccacatgcgcgtcctcgacctcttccccggccccgaccctgacctctaacgactgcagtaggggcgcgagtgcctggtcatctcgggtagcacgtgtactcaccatgtgtgagagaatataagacaaaagtttagaattgtgatgtcaaaatatcgcacgacaaggaaatccaatgaagtggaaattttcctaacagtgacatagcctctcatagataagtacaggcatctccgtaccgatcagcgagactctaataaaccggcttgtgatccatgactcctatgaacctagagctctgataccaacttgtcacgacnnnnnnnnnnnnnnnnnnnnnnnnnnnnnnnnnnnnnnnnnnnnnnnnnnnnntcgttcgtaaaccattgtgacgacacctagtctctacgattaggtaagcctaaaatgtggaagataaaccaaatttgtggaagaaaataatttaaaacagaaatagagtaataaaacaacgtttaaaagtgtcgctcgacatacacaatattaactcttaaaaccaatacattttcccaaaacccgggaacccatgaatcacaatctaagagataaataagaatctctaactctagaaatgtctaaccaaaaggggaatactgaagggctatactattatatcaagatagaaagggactcctcggtctgcggacataacaaatatatctcgaagtctctacagaagcgcctcgcctcaaggatgataagacagagtaaaagtacttggatctgcacatgaaaaacatgcgcagaagaggcatgagtacaccacagcggtacttagtaagtgccaagcctaacctcggtctggtagtgacgagaaaggtcagggccctactgagtttaaataaaatataaggtataacagtgtataataagacagtataattaagtgcaacagtaagaaataacatagaatagaaagaataacaacaacaactagaacagagacaaaataatcacggaaaggaaatacaactcaagagagagataacaaccggggtaccttccaggataccgtcttgtagtcccaattacatctatccagtggatctcctgggataccgtcccgtagtccatcatatgtatccaaaagatctctcgggatcccgtcccgtagtccaactatcagtgcgcggggatctaccggaatcccgatccatagtcccaaatataaatacctagtactgggagaatctgccatgtgcagtcccgtagttccatataactatgtagagggatctaccagaatcacacatccgtagtcccaattaaacagacaagggagatctaccggaaacccacatctataatcccaaataaatagacaagggggatctaccggaatctcacatccgtagtcccaaataaacagacaagggggatctaccggaaccccacatccgtagtcccaatgtaaatacacagcagcaacaggaaaatattcagaaatgacaaatttcatattaaggcaaacaagtaattctagcctagcatgctgcacagaattcaggtaagacagtttgagcaagtaaagcaattaagtcacttagacatgctttcctaagctaacaacaggcttaataatgcaagtaataaaaatagaaaagaaaacatactagtaattacttaatgaaaaacaaatttacaacaattagcacaagtacgcactcgtcacctcacgtacaaggtatttcaataaccaaatataccaaatcctaagggaatgtcccccacacaaggttagacaagtcacttacctcaaagcggctcaataatcaatcctaaaccacgctcttgccacgagtactcgactccaaatgacccaaatctattcaattcaatttcataacgtaaataacacttcaagtaactgannnnnnnnnnnnnnnnnnnnnnnnnnnnnnnnnnnnnnnnnnnnnnnnnnnnnnnnnnnnnnnnnnnnnnnnnnnnnaatttacattttcagaaacctcgtaccctcacgagtctatacataacaagaacactgaaatcagagttcaattgaccccctaaatacccatgttaaggtctcttaatctcaagccctaattacccatttttcccaaattcttcaccaccaattaggtctttaatcacatataacgagttatgaagtcaaaaatattacctccaagtgattcctcttgaatccctctttaatccccttcaaaaagcttcaaaatcgcccaaaatggaggaacttaggctcaaaaccgcggaataggccttctaaattattctgccaggtatttaaatccttcttcgcgaacacggtcaaagactggcgttcgcgaagcacaaattgacgttgaccacttttccttcttcgcgaacgcgcccctttattcgcgaacgtgaaggctcagcttcccagcccatcgcgaacgcgactcccttctcgcgaacgcgtagttcaaagacctcatcccttcgcgaacgcgggacctccatcgcgaatgcgagggtccacttatgaacgcaaagagctactggtctgcaacacacacatcagttttctgcaacttcaaacatcatgaaatggctcgattgaccacccgaaactcactcgaggcccccaggacctcaaccaaacctaccaacatattccataacttcattcaaacttgttcgaaccttcggaacgctcaaaacaacttcaaaacacctatttttcattggattcaagcttaagaatttcaaaaactctaaaaatatgctttcgatcaaaaagtctatcaaatccaacggagcacacacgtcacattaaacactacggagctactccaacttctggaattccattccgaccctcagatcaaaatctcactatcgaaccggaaacttcaaaannnnnnnnnnnnnnnnnnnnnnnnnnnnnnnnnnnnnnnnnnnnnnnnnnnnnnnnnnnnnnnnnnnnnnnnnnnnnnnnnnnnnnnnnnnnnnnnnnnnnnnnnnnnnnnnnnnttttacctttcggcacttcaagcctaaattagctacggacctccaaaatacaatccgaacacgcccgtaaaacaaaatcacccaacggagctaaggaatcatcggatttccattccgaggccgtctttgcattgttccgactacggtcaactttccaacacttaaactctcatttaggaactaagtgtcccaaaactctccgaaactcaaaaccgaacatctcggcaaatcaaattagtagaaataaactcggggaaagcagttaataggggatcggggcattaattgttaatacgaccggccagatcgtcacacagttgttcttggacatgcttaacgcatataatcttcattgaagatgaaacaattcaagttctttagatataaagagtaggagaagaaatctataaagagcatacataaaaaataagaatactttgattccccaaagtattaattatatcccccaattggaagctgccaaaaaatctcaaagtagctaaagaaatgcaaagccctgcagaacttgtttgactactaaattaagtcagaaatataaaaaagaattgatcaaccaataaaagatgaatattttagccatcaaactagaatcatctaccgatgaagtagccatgattaattctaaatttataggtactgaaattttagtagacaatatgtataattggttgaatatataccttgacgaaaattgttgggtagatttcttaagctgtcattgaaagcaacttttctccaagatcaccagaaattgtagcgattgttaactcactttcatcagtaagatcaatttggaataattactcacgggacaaagtaaaaataatcactcacatgaacaatataccactgaaactactttctaaagaacatcattttagcatcgactctagtccttcgagaaattgaaaaaaaaaacatacagttaactcgccgaatcaaattacaaaaggaattatacagagttaaagaaagtaagttgatggtttccaataattgaatggctggttcttcaacagtaagcaactgaattacaaaaacaaactcaatccatacaacataaataataacacatattaatagcataaaaatctcaattaatgttacacactcaaccatcattcgtttctcccaaattctagcaagtctaactaataggtcaataaagatgggaagaaatcaccagcaaaataaatctcctaaagattactgatctgtgaggattgaatcacatgcataaaatataagttagagacgcaaaatgtaatcagggaaaacaatcttcaatctctgttgcactaaggatcaaataccagacatgtatgagaatatcagaccaaattactgacatgcatgtagaaaatccaacaataaactaccaaaaagaacccaaaaagggagtgagacagaatgagagagagagagagaatataggaaactaacatacatccagcagatagcgattagcaacgaaaaaggtgcaacaaacaataaaacagatgcaaagaaaaactcaccaaaacaaagttcacactttgaattannnnnnnnnnnnnnnnnnnnnnnnnnnnnnnnnnnnnnnnnnnnnnnnnnnnnnnnnnnnnnnnnnnnnnnnnnnnnnnnnnnnnnnnnnnnnnnnnnnnnnnnnnnnnnnnnnnnnnnnnnnnnnnnnnnnnnnnnnnnnnnnnnnnnnnnnnnnnnnnnnnnnnnnnnnnnnnnnnnnnnnnnnnnnnnnnnnnnnnnnnnnnnnnnnnnnnnnnnnnnnnnnnnnnnnnnnnnnnnnnnnnnnnnnnnnnnnnnnnnnnnnnnnnnnnnnnnnnnnnnnnnnnnnnnnnnnnnnnnnnnnnnnnnnnnnnnnnnnnnnnnnnnnnnnnnnnnnnnnnnnnnnnnnnnnnnnnnnnnnnnnnnnnnnnnnnnnnnnnnnnnnnnnnnnnnnnnnnnnnnnnnnnnnnnnnnnnnnnnnnnnnnnnnnnnnnnnnnnnnnnnnnnnnnnnnnnnnnnnnnnnnnnnnnnnnnnnnnnnnnnnnnnnnnnnnnnnnnnnnnnnnnnnnnnnnnnnnnnnnnnnnnnnnnnnnnnnnnnnnnnnnnnnnnnnnnnnnnnnnnnnnnnnnnnnnnnnnnnnnnnnnnnnnnnnnnnnnnnnnnnnnnnnnnnnnnnnnnnnnnnnnnnnnnnnnnnnnnnnnnnnnnnnnnnnnnnnnnnnnnnnnnnnnnnnnnnnnnnnnnnnnnnnnnnnnnnnnnnnnnnnnnnnnnnnnnnnnnnnnnnnnnnnnnnnnnnnnnnnnnnnnnnnnnnnnnnnnnnnnnnnnnnnnnnnnnnnnnnnnnnnnnnnnnnnnnnnnnnnnnnnnnnnnnnnnnnnnnnnnnnnnnnnnnnnnnnnnnnnnnnnnnnnnnnnnnnnnnnnnnnnnnnnnnnnnnnnnnnnnnnnnnnnnnnnnnnnnnnnnnnnnnnnnnnnnnnnnnnnnnnnnnnnnnnnnnnnnnnnnnnnnnnnnnnnnnnnnnnnnnnnnnatagagaatcagaaaatatttgagaaactctcaaaaaggagaaacggatcagttagatagagaagtaaaagaaaaggggataggattcgacaatgaccatggtagagtatcaaaacaagcaagacgcgtgtttatagcgtatcagtaaaagtctttagaactaatattataagtattaccaatttaaccttagaagagttcgcaatgctaagagtacaacgcttaaaactttttgtacaaccacctagagcagtgttcgtcctttcaaactctcatttctaaatagtagaaaaatactagtatctacttcatggaaaaaaaaaaaacataaatgatcactagagataatacatttgaactccaaagaaaatggacataatcagtaacagaataaaaatactccataaaatatctaaatttcctaagaaaaaacttaaaaaatatatttaaaaaaatatacattgaaaacatattaaaaataggaaaaatagttttaaaaaacagaaaacatacctctaagaaggaggaggaccggtcgaaatgaagacgaaaggggtttttgccttttattttccgacgatcgatgacttattatcgccaaatataattattttaagaaatttagtgaaagtcgagtgattttgtgtttagaaaaataagtttaggattttcgtgcaattataaactgagtgactgtgtaattaacccttttgtaagagttgaactctctgaagatataagtgtgtgtatttatttccctcttacatcctccaaaatgataatgtaagatgagcataaggacaactttcacctaattgtgactgaaatatgtaggagctgcctgtactgtagtaagtccatatgctagctattgataatgttaggatccgaaactcaggtagtgcggaatttagccaaataatattataatgtcaataataaagacaatgtaagttgataacaacgacaaaaaaaagataccaatttaatatggttcagtcagtgtgacctacgtccacaagcgaagaagagcaatttcaccataccaataagagtacaaaattagaataaatactctaattaatcccaaatacccgaagagaataacccactagatcactccaaagaaagggttcacataaatatttcctaacacttaactctcatacaaaatactcttaataactaaaggaggagaagaagaaacaagaaatgaagactcaagtcttgttggtgtgtctaaaatgaactaatggtctttggttttgtaggcaaaaaagccttggcctccaaggtgtaagagaaaagatacagcttgtgcaaatgatatctattacacaatgcaatatttttgggtcccaaagaatattatcaacaaggtctactttgcaaatatacttatgcttatgtgagatggagttcactaaccaaaatattggttatattacaaataataaaccacaaaaggaattccaacaattaaaaaatcttttatatatatgatgagagacaaaggaaaggaaaggaaatgatgagattccaatgttcgtactgcaataacatctgaaaaaaggaaatcaatacatgtcaaagttgaactctatataggagttttaggctaagaacgggaaaaaaaggagaattttagaaacagtaataagaaaaatgtaaaaagagaaagaaggatcaaattactatttacagctaattagaatattacatgtagtatcagcacaaagaattaagtaatataaagaaactagtctgtgaaatcgtttcagtgaactgcttcttggatcttggaaaatacagcttaattcctggtactagacggaattcaaacgcgttctttgacgtaatcgtagagatctgcaataagaaagaaaagccaataactcctattatattctttaattttccaacaaaattaattatattcttggtggaaaaactaaataaagtgttacttatataggatgccaaagtatgagaaagggaagggagcctataaaatatgaacatatatacagttgaggagaaaataaaggaaagtgaaaaacaacaattaattctgaaagtcgttaccttcatatatatatatgcgaagagcaagacaatcacttcccgccatggcagctacttcctcctgaatttctctggctgaatccacaattagaccgcatttatacaactcaattgactccaaggtgtatgtatctgcaaaggctataggaattcgcctaagaatcttgattttctccaatacgaggcgttgaagatttggaaagttaacattggtagcctcccagagttgtgtctctgtgtcatcaagtagaaggaactttagctgcttgaactcatcttcctcctttaatttccatacctcacctctgaatgcatgacatctaagtttgagtagttggagatttggtaacttggcaagatttgccatgtcttcccagggaagccaacttccagatagggtcaatctctttagcgatattgggaaacaacatttagccagagagagttcccttcatcaaaggaacactctaatactcggagtttattcaagtagagcaggctccaacatgtttcctctaatgctttgtatttttccccgatatcatagatacgtaatttctttagatgaggaaggccaagaaatacctcttttgtacagctagcaagacagagactggaaagctcctgcagatgttgcagacccaactcgtctaccacatatgggttgggcaaataagtgctaccatgtagacggagatgcctcagctgcttcatattccagatatggttaggtaaagttaaaattccacgccactccagattgtgatgaacaaaactaaaggtttgcaggttatgcatatattcaagtgattcagtaaaatgattgtctatgtgaatctcaagatagctgaatctaaggtcatgcgacgcctgaagatgaaatgatacctaggaatggcagccaacaccctcaaagctttgaattccaatggttttcctattgttttatgaggttccttgaaaagatacaagcaacgcaaaaattttgctgacttggtaaagttttcccctgaaatgcgtgtatgcaaactaaagcgaggagtctcataatgaaaattaggaatttgattagttctaaacacatccggaagcgctcacatccccaacaagtcatgcatacggcaaatttttgatccggccattgagtttcccccttttgaccattattaaatttctgctagccagatcttccaaacaatcctctgccactttttccaggcttctcagcttatccctcttcagaaaaccctctgcaacccacagacgaattaaccgccaagcatcaatctcagaatcctcagggaatgctcccatatggaggaaacaaggtttgaggtgaataggcaggtgatggtaactgatcgcaagcactgctatgcattcattcggataacttgtaacaacttcattcacattttcagatacagttacccagttttccctttttggggaaatcctagagagatgcccagcaaccaccaaaattgctagaggcagtccctggcatttttgtactattttcttcccgatatcttctaattcagaatgacaattaatgtggcttttccccaacaacttattctgaagtaacttccaactctcatctacccctaacggcagcacttcaagaggagggatatcagggttagcatactcagccacatcttttagcctcgtagtcagaatgattcgacttccattattgtcatcaggaagggttctcgcaatcaaatcccaaatctttgtactccaaatatcatcaactacgataagatacttccgacccttaagtgctttatatgactggtccattaactggtcatcactcattccctgaaactcgtatcctgtaaggctacgtgcaaggcttggcaacacttcgtttaagtgatattcttgagatatagtaacccacgtttggatgtcaaaatgtgatctaattgattgatcatcttgagcctttttagcaagtgtggtattgccacatccacccattcccaaaataggaatgacgttctgctcagaagctaatccaagtagtgcatcagtgagttttctcaaggaattcgccaaaccgactgtatcatcatcatcatcatcatcacctagaagggaagtaggagcaaggtttgaagaagaaccagctaccagagaatgtccctttttgaagaaatgatcctcatcatcaggggggccaaggcaacgagcataggtttcagtggagaaggagttaatccgcctcacctatttctttacagcatcaatcttgtctaccgcttgaggcaagactcgaagaagaacccctacttcatcctgaaaagtctcgtcaatattattctcttcttgttgcctccatcattctctcataatttccgcaacatttgattcaagcacatcttcagcttggtgcatcgctgatcttatctctgcctcaaaatatttgaatgtatcatattcctgtttctggtggctagcgttctcaagaatattttgaaaatattcagcactggcatggagagagtcaatcatctctgcagtttgaccatggatcaatgctggataagtcttttggaatagctccaaagtttgaattaaagagttcactgcaggataagccattactttcaattactcagtgggagagaaatgctttcaagatttactataagctctttcgaaacttatactagctagctagcacttaattttcagatcagcttggtcaaacagcaatttggaaagccaaatgggtgttcatggaggatggttctattttcaacattagtgcaaaagaagcctatttaaactaattagtgcaaaataagtctacttaaactaataagcgaaagagaagtggccttctatttaaaaattaaaataaattgatctatttaaactaaccagcgcatgcaagagaagtttacttaaactagaagtctatttaattacgacaaatggccaaatatacctttgtactgtaacaaaaaatttaaatataccctttgttataatttggatccaaataatactattgattctaatatactcctcttcttttaaaaatgttcaaggtggacattcaatcctacgtgacactgatatttgatgaggtggatgacacatgacataccacctcagcgcccataatccatatataaaagactaaaatttgaaatacaatattttttatggtagcgataatggtagcaatggtggtgggggggaggaaattttagtggtgaaaacaaaataggaggggtaaaatgggttaggggcgctgaggtggcaagccatatgacatccgcctcatcaaatatcagtgccacataggattggatgtccactttggacaaacttaacagaaaaacagtatatttgaaccaatagcataacgatatgggtatatttggactcaaagtataaagacagggtatatttggactcaaagtataacgagaggtacatttaagagcccgaaaccaaagtgtggtctttttggagtcaaacaaccaaaataggtgaaaaaaataacggattaccattttatatatagcggggttattcacggcgctataccttaacgacacgtttatccgaaaagcttttatgtgaaaatatgagatatagaaatttctagagttaaaatttgaatatggttgactttggtcaacattttgagcaaacggacccggatctgtgttctgacggtcctgggaggtccgcagtaaaatatgaaacttgggcgtatgcccggaaatgaattccgaggtcccaagccttagaaataagtttttgaaaaaaattattttgctgaattatttatgaaataaagaaaagaattaatgattgaaaccattggtatcgggcccgtattttggttccgtagccctgtacaaacttgttaaagtatttaaatgataattgtgaaatttggtgaaaaatggagttatttgacgtgatttggacctcaggttgaagagttatgaactttaagtgttcttgatgaaaatgatgagttttgaggattaatacatagttttacatgttattttcatgatttgattgcatgagtaagtccgtatgatgtttttggattagtgtgcatgtttggtttggagccccgagggctcgggtgagttttggataggccatagagtgaaatttggacttaggaagttgcaggttttagctggtatgttgtaggtctgcaggcttcgcaaatgcgataatcgacctgggctaccttagtcgcaaatgcgattgttctatcgcaaatgcgaaggtgatcgaaaattaaactgggtcgcaaatgcgaagggctcagttttctgaggggttcgcaattgcgaaccctgatcgcaattgcgacacctgtaacctgcaaaatcataacttagacgtatttcaacaatttttcaaaccctttcaaaaccaaaacactcttgggcgatttttcaaagacaaacactcttccaaatcaattgtaagtcatttctaacttgtttttattaatttttaacatcttttcttatgatttcaactcaaaattaaaggttttcatagaggaaattgggtgttttgggtagaacctaggtttttcaaattttggggatttggacctcaatttgaggtccgatttcaaaataaaatatatatttgggttcgtggaggaatgggtaatcgggttttggttcgaaccttgggttttgaccatgtgggcccgggacgattttttgactttttgggaaaaaactttagaaaacatattttcatgcattggaattgattcatttagcatttattgatatagttaagtaacttgtggctggagacgagcgaattggtggtggaatcaagaggtaaagcgatagttgaggcttgaattaactgcacaggtttatttggtagtttggttctagcctcgtcactacttcgctgaggttaggctaggcatttactagcacatggggtcagttgtgctgatactacactcttcaatgtgtgcagatacttataccggagcatttggaccgcactgagggtgttgtctttagtccattcaggcgacccgaggtagtctattcaggcgacccgaggtattcagagacagacttatgtatttcattcagaccttatttgtagtattcttagatagtccgtgacttgtgacaccaaattctgggtagtattgtactttaaattatgtagcagtgtttggttgaattattaagttttcgtattccgcatttctggttatttaatttatttcgctgtttaatcacttattattttaaattgtcgaacatttttaataaaaagtgtaatgattttataatattcggcttgcgtagcttccacgagtaggcgccatcacgactctcgagggtggaaaatccgggtcgtgacaagttggtatcagaactctaggttacataggtctcacaattcacagacaagcttagtagagtctgagggatcggtatggagacatttgtatttatccccagaggctacagagttaggaaaaacttcacatctattctttcctgtcgtgcggtctggtttctcaatgctaattaaatttctactttgttctttcctagatggcgagaacacacgcttcctcatcaattgataagcagcccgagcccccagcagcagctcccacgaggggcagagggcgaggccgaggtaggggcagagctcagcctagagcagcagcaccagcggcggagcctcaggttgagtttgatgatgaggttacgacccaggaagttccggtgggcctagctcatgtctcagaggggttcattgctaccccagtactccaagatgctctggtccgtctagtgggccttatggagagtgtcacccgggcatacttgcttcatcgtagcaccaaccatctctcaagctggaggaggagcccaaactcctactactcgcacttcggagcagatggctccccagtttcagactctaacaactcagccagttggagcagttcagccggatgtggtagctcagaccggtgatagagcagctatgtctgtcgatgccttgtggagattggacaggttcaccaagctcttcactaccacttttagcggtgcatctttggaggatccccaggattatttggacagatgtcatgaggttctcaggaacatggggatattggagaccaatgggatcgactttgctactttttgcttatctggattcgccaagacttggtggagggattattgtttggccagaccagttgggtcaccagctttggcttgggatcagttttctcacctttttttggagaagtttcttcccgtcactcagagagagatctatcgaagacagttgaatgtttccaacagggttctatgactattactcagtacgagaccaggtttattgatttggcccgtcatgatctacttatactccccattgagagagagagtgaggaggttcattgagggactcattcagcctattcgacttcagatggatgaggagacagggagtgagatttctttccaggaggtagccaatgtggctaggagagttgagatggttctatcgcagagaggtggtcaggagtctgataagaggcctcgtcattcaggcagattcagtggcgcctcatctggaggaaaggatttgtatggtagaggccaaccttctaggctttttcattcagcacttcaggtttctcacggtgcttcaggtggctgtggtcctcatatgcaatattctgatcagcagtcctacagtgcaccaccaactcctatcagtgcaccgtcgctttagagttttcagggtcgtcagtcccagcagccgagggcttgttttacttgtggcgacacgaggcatattgctagatattgccctcgagcaccgagcagttctcagcaccagagttcccatgccatggttcaggcatcgagtgttccaccgcccgcccaaccagctagaggtaggggttgaggtgctagaggtggaggtgctagaggtggaggtataggtattagaggtggagctcaggccgctagaggtggaggccagccagtagtagtccatcccagagatgtagttcagagttgtggggcccagcctcgatgttatgctcttccagccagacctgaggctgaggcttccgatttagttatcacaagtactattttggtttgtagtagagatgcttcagttctatttgatccaggatctacgtactcctatgtgtcatcttattttgcaccnnnnnnnnnnnnnnnnnnnnnnnnnnnnnnnnnnnnnnnnnnnnnnnnnnnnnnnnnnnnnnnnnnnnnnnnnnnnnnnnnnnnnnnnnnnnnnnnnnnnnnnnnnnnnnnnnnnnnnnnnnnnnnnnnnnnnnnnnnnnnnnnnnnnnnnnnnnnnnnnnnnnnnnnnnnnnnnnnnnnnnnnnnnnnnnnnnnnnnnnnnnnnnnnnnnnnnnnnnnnnnnnnnnnnnnnnnnnnnnnnnnnnnnnnnnnnnnnnnnnnnnnnnnnnnnnnnnnnnnnnnnnnnnnnnnnnnnnnnnnnnnnnnnnnnnnnnnnnnnnnnnnnnnnnnnnnnnnnnnnnnnnnnnnnnnnnnnnnnnnnnnnnnnnnnnnnnnnnnnnnnnnnnnnnnnnnnnnnnnnnnnnnnnnnnnnnnnnnnnnnnnnnnnnnnnnnnnnnnnnnnnnnnnnnnnnnnnnnnnnnnnnnnnnnnnnnnnnnnnnnnnnnnnnnnnnnnnnnnnnnnnnnnnnnnnnnnnnnnnnnnnnnnnnnnnnnnnnnnnnnnnnnnnnnnnnnnnnnnnnnnnnnnnnnnnnnnnnnnnnnnnnnnnnnnnnnnnnnnnnnnnnnnnnnnnnnnnnnnnnnnnnnnnnnnnnnnnnnnnnnnnnnnnnnnnnnnnnnnnnnnnnnnnnnnnnnnnnnnnnnnnnnnnnnnnnnnnnnnnnnnnnnnnnnnnnnnnnnnnnnnnnnnnnnnnnnnnnnnnnnnnnnnnnnnnnnnnnnnnnnnnnnnnnnnnnnnnnnnnnnnnnnnnnnnnnnnnnnnnnnnnnnnnnnnnnnnnnnnnnnnnngtatgtggtcatgcctagtgattctttgagtgctcttgtatatgtgtctatcgctataggtgattctattatggtagatcgtgtccatcgttcatgtatagttgtgattggggggtcttgagactcgtgtatatttgttacttctggacatgattgattttgatatcattttggggatggactggttatcacctcaccacgcgatcttggactgtcatgccaagactgtgaccttagccttgccaggtttacctcgtttagattggagagggactcctggtcattctacccatagtgttattttatacatgaaggctcgaagtatgatcgagaaggggtatttggcttatttgtcatatgttcgtgattctagtaccgatgttccttctattgcttctgtgcctgttgttcgtgagcttcctgaggtatttccttcagacttgccgggtatgccacccgacagtgatattgacttctgcattgatttggctccgggtactcagcccatttcaattctattgtatcgtatggccccgcttgagttgaaagaattaaaggaggagttgtaatacttgcttgagaagggcttcattagacctagtgtctcgccttgggcgcgctggtattgtttgttaagaagaaggatggatcgatgcgaatgtgtatagatttccggcagttgaacaaggttacaatcaagaataagtatccattgccgaggattgatgatttatttgatcaacttcagggtgccaaggtattttcgaagnnnnnnnnnnnnnnnnnnnnnnnnnnnnnnnnnnnnnnnnnnnnnnnnnnnnnnnnnnnnnnnnnnnnnnnnnnnnnnnnnnnnnnnnnnnnnnnnnnnnnnnnnnnnnnnnnnnnnnnnnnnnnnnnnnnnnnnnnnnnnnnnnnnnnnnnnnnnnnnnnnnnnnnnnnnnnnnnnnnnggatgattagggcatctgatgtccctaagacagatttctgcactcggtacgggcattatgagttcttggtgatgtcattcgagttgacaaatgccccggtagattttatggatttgatgaatcgagtattcaggccttacttggatttgtttgtgatagtcttcattaatgatattttgatctattcccacagctgggaggagcatgagcagcatctgagagtagtcctccaaactttgagagatagtcagttgtatgctaagttttcgaaatgtgagttctggttgagttcatttgcattcttgggtcatgttgtatcagcaaagggtattcaggtagatccgaagaagatagaggctgtgaagaactggcctagaccagcatcaactacagagatccggagtttcttgggattggcaggctattatcgtcggtttgtagaggggttttcatctattgcagtcccgatgaccaggttgacccagaagggttcctagttcaggtggtcggacgagtgtaaggcgagctttcagaagctcaagacagctttgactacgacgccagtgtttgttttgtccacaggttcaaggccatatacagtttattgtgacgcatctcgtattggacttggtgcggtgttgatgcaggatgacaaggttattgcatatgattcgcgtcagttgaagattcatgagaagaattatccagttcatgatttggagttagcagccattattcacgcgttgaagatttggaggcattatctatatggcgtgtcatgtgaggtgttcacggatcacaagagtttacaatacttgttcaagcagaaggagctaaacttgaggaagaagatgtgattggagctattgaaggactatgatatcaccatcttatgtcatccgggaaaggccaatgtggtggccgatgctttgagtaggaagtcagccagtatgggcagtcttgcttatattccggtcggtgagagaccgcttgctttggatgttcaatctttggccaatcagttcgtgaggttggatgtttctgagcccagccgtgtgttagcttgcatagtcgctcattcttctttactggagcgtatccgagattagcagtatgatgatcctcatttgtatgtccttagagacacggtgcagcacggaggtgccaaacaggttacattaggagatgatggagttttgagattgcagggtcgagtttgtgtgcctaatgtggatgggctccgggagttgattttagaggaggctcacagttcccgatattctattcattcgggcgccactaagatgtatcaggatttgcggcagcattattggtagaggaggatgaaaaaggacattgttgcatatgtggctcggtgtttgaattgtcagcaggttaagtacgagaatcagaggcctggtggtttgttccagaagattgagattcctgagtggaagtgggagcgtatcactatggacttcgttgttggactcctacagacttagaggaagttcgatgcagtgtgggttattgttgataggctgaccaagttagcacatttcattcatgtggcagtctcctattcttccgagaggttagctgagatctatattcgggagattgttcgtcttcatggtgtgcctgtgtctatcatttcggaccgaggtacatagtttaccttacatttttggagagcatttcagcgagagttgggcacatgggttgagttgagcacaacatttcatcctcagacagacgggcagtccgagcagactattcagattttggaggatatgctacgagcttgtgtcattgactttagaggctcgtgggattagtttttgcctttagcagagattgcctataacaacagctactagtcgagcatccagatggctccttatgaggctttatatggtaggcagtgccgtcgccagttggatggtttgagacggaagaggctcggttgttgggtatagatctagtacaggatgccttggacaaggttagtatcattcaggatatgcttcgtacagctcagtccaggcaaaagagttatgccgatcttaaggttcgagatttgtcattcatggtcggtgagcgggtgttgcttcgggtgtcacctatgaagggcgtgatgagatttaggaagaggggcaagcttagccatagattcattggcccatttaagattcttgatcgagtggaagtggtggcttacagacttgcgttgccgccgagattatcagtcgtgcatccaatgtttcatgtgtccatgcttcagaagtatcacggctttccatcccacgtgctatatttcagcattgtccaattggacaaggacttgtcctatgaggaggagccggtagctattctagaccagcaggtttatcagttgagatcgaagaatttatcttctattcgtgttccatggagaggtcagcctgttgaggcatcaacctgagagtctgagtccgatatgaggagcccctatccccatcttttccccgactcgggtacttccttcttatgtctgttcgaggacgaacggttattttagaggtggaggatgtgatgacccaaaaggtcatcacttgtgttagaaacaaattctgtgttccgaggccttaaacttcctttttacctcacctcaatttgcgtgcatggtctggacgtatatccggaaagcttttatgtgaaaatatgagagagagaaatttctagagttaaaatttgaatatggttgaccttggtcaacattttgagcaaacggacccggatctatgttccgtcgatccccggaggtccgtagcaaaatatgagactcgggcgtatgcccggaaatgatttccgagatcccaagccttagaaattaatttttgaaagaaattattttgctgaattatttataaaataatgaaaagaattaatgtttgaaactattggtatcaggcctgtattttggttctagagcccggtacaaacttgttaaattatttaaataataactgtgaaatttgttaaaatagagtttatttgaggtgatttggaccttcggttgaagagttatgaactttatgtgttcttgatgaaaatgatgcgttttaaggtttttttttttagttttgaggtttaattcatagttttacatgttattttcatgatttgattgcacgagcaagtccatatgatatttttgggttagtatgcatgtttggagccccgaggactcgggtgagttttggataggctacggagtgaaatttggacttaggaagttgcaggtctgcaggcttcgcaaatgcaaagcttggctcgcaaatgcgagagagcatcgcaaatgcgataatcgacctgggttgccttagtcgcaaatgcgactgttctatcgcaaatgcgatatcgcatttgcgaaaggtccctcgcaaatgagaaggtgaccggaaattaaactgggttgcaaatgtgacattatcttcgcaaatgcaaaggtgtcaattttctgaggggttcgcaattgcgaaccctgatcacaattgcggcacttgcaacctgcaaaatcataactaagacgcacttcaaccattcttcaaaccctttcaaaaccaaaacactcttgggcgatttttcaaagacaagtactcttccaaatcgattgtaagacatttctaacttgtttttattaatttttaacatattttctcatgatttcaactcaaaataaaaggtttttatgggggaaattgggtgttttgggtagaacctaggtttttcaaattttgggggtttggacctcgatttgaggtccaatttcaaaacaaattgtatatttgggtttgtgagagaatgtataatagggtttttgttcgaaccttgggttttgaccatgtggacccgggggtgatttttgaatttttaggaaaaaacattagaaaatttattttcatgcattggaattgattcatttagtatttattgatataattaagtaacttgtggctagatacgagcgaattggtggtggaatcaagaggtaaagtgatagttgaggcttgaattgtgttcgtggcnnnnnnnnnnnnnnnnnnnnnnnnnnnnnnnnnnnnnnnnnnnnnnnnnnnnnnnnnnnnnnnnnnnnnnnnnnnnnnnnnnnnnnnnnnnnnnnnnnnnnnnnnnnnnnnnnnnnnnnnnnnnnnnnnnnnnnnnnnnnnnnnnnnnnnnnnnnnnnnnnnnnnnnnnnnnnnnnnnnnnnnnnnnnnnnnnnnnnnnnnnnnnnnnnnnnnnnnnnnnnnnnnnnnnnnnnnnnnnnnnnnnnnnnnnnnnnnnnnnnnnnnnnnnnnnnnnnnnnnnnnnnnnnnnnnnnnnnnnnnnnnnnnnnnnnnnnnnnnnnnnnnnnnnnnnnnnnnnnnnnnnnnnnnnnnnnnnnnnnnnnnnnnnnnnnnnnnnnnnnnnnnnnnnnnnnnnnnnnnnnnnnnnnnnnnnnnnnnnnnnnnnnnnnnnnnnnnnnnnnnnnnnnnnnnnnnnnnnnnnnnnnnnnnnnnnnnnnnnnnnnnnnnnnnnnnnnnnnnnnnnntttagcttgggggattaggagtcgagtcttaatttctacgtgttaactgtggagtacgatgtataggcatggtgataagtatctatacgtcggtatcaagcatgcccgtgaatcttgtattgaaattttatgactccgttgtagtttattcgtgcttcatatgagaattatattattattcccttgccgggatgttgttgtgatattattgttcccttgctgggatgttgttataatattattgttcccttgcaggtatgttgttattatactattatttccttgccagaatgttattgttacattattgttcccttgccgggatgttgttgttatactattgttcccttgccgggattcttttatgattggtgttgataaatgaaataggagcgggttgcacgcctgcaactgtaatatatgaaatgagagtgggttgtacgcttgcaacggtaagatttgaaatgggagcggcttgtacgcctgcaacagtaatatatgaaatgggagcgggttgcacgcctgcaacggtaatatgtgaaataggagcgggttgcatgcctgcaacggtaatatgttaaatgggagcgggttgcatgcctgcaacggtactatatgaaatgggatcgggttgcacgcctgcaacggtattacatgtgtacttgttttccttatttccttatcttttgcnnnnnnnnnnnnnnnnnnnnnnnnnnnnnnnnnnnnnnnnnnnnnnnnnnnnnnnnnnnnnnnnnnnnnnnnnnnnnnnncatttttctactgttattctgttattatctgttactccccacaacatgtttcccctgcccaactttaacagtaattatctacttttatttccattgtatatgatttaactgcacatgtttatttggtagtttggtcctagcctcgtcactgcttcgccgaggttaggctaggcacttaccaacatatggggtcggttgtgctgatactatattctgtactgtatgcatatactgataccggagcgtttggaccgcagtgagggtgctgtcttcagtctatttaggtgactcgaggtagtcctgcatgcatccgcgggccttggcgtctcctcatatcttttctctttctgtttttacttattcagagacagacttatgtatttcattcagaccttatttgtagcattcttagatgctccgtgacttgtgacacaaaattctggatagtattgtacttcaaattatgtagcagtgtttggttgaattattaagttttcgtcttccgcattttcggttatttaagttatttcgatgtttaatcacttattattttaaattgttgaacatgtttaataaaaagggtaatgattttataatattcgacttgcctagcttctacgagtagatgccatcacgactcccgagggtgaaaaatccgggtcgtgacaggatctcgtctattgctcgtttcggctaccaaatactcaattttttcatatttcaaaaaaaattaaatctaggtgtcacgacccaattcccgaacccggtcgtgatgacgcctctcttgaagacaaggccagctaaaccaaaacagaatacctcttttaaacagttaaatatcattaatcgttctaaagcatgatataatatccataatttgcgaaattaacgataacaacagtaaaagccatcccgacatagcccaaattggggtgtcacaagtcatgtgcaactaagagaaaatcgtgatacagtctactaatcactaaactcgatacaatagttctaagaacatgaaaatgataagataagggaggcacgggggctgcggacgccaacagctacctcgtgatctccgaaacactgcctggacgggaagatcagcactcaggagcggactttgcgatgcctgaatctgcacacacagtgcaagcagtaatgtgggtactccgacctagtgagtaataatcataaataatggctgaaagcaagaaaacacataaaggcacaaagcaattctatatcaagtagtaaaatcacttaaagcaatagatcggtgaagaagtcaaatggaatccctttaaaccaagtaaaacaggtaatttagcaggtaattaacaagtagaaatccacccctcgggcacagtatcaatcactcaaaacggtatcagctcctcgggatcactcttatcacttagtgctcattctaagctcttgacccatatatctctcataataatagaaatcagaataaccgctgcggcatgcatcttgattcgtacatcgttgtggcatgcagcccgatccttatagatagtcgactgcgctcactgggggtgtacagactccggaggggctcctacagcccaagagctatattgctgcagcgtgcagcccaatccatataagtgttgcttcggcgtgcagcctgatccataacatatataatatcctcaccattgggttctcaacccctctctgtcatttacctcacagcctctcgggcacaataatagaagatacggatctcagcccacaaattcctctcatttaggaatagtatgataaaattcgactcgaatcgtttaaaacagatagaaacatgaccgaggatatgatttttaacaagtatagtgaggaaaaatcagtcaaaatccccgaagggttcagatagttcgcacgaagcccaaatatgacaattagcccaaataatgatgataacaaataagtttcagtcaaatatgcggtaaaatcatcagtcgggacggaccaagtctcaatccccagtagtaaaagaccccacgctcatcatccagcgcgtgtctcacctcaatatagcactacgatgtgcaatccggggtttcaaaccctcagagacatcatttacaatcattactcacctcgaaccggctaaaatctctatctcgcgacgcctttgcccctcgaatcggcctccacgcgcgtcgaatctatccaaaatcagaacgaatacatcacaataggctaagggaacaaagcccaagcgaaaacaatcgaattaccacaaaattctagaattggtcaaacccgacccccgggcccacatctcggaatttgacaaaattcacaaaactcgaatccttatactctcacgagtctaaccatatgaaaattatccaattccgataccatttggtccttcaaatcatcattttacatttttgaaagatttcacaattttcttcccaaattccatcccaaatcacgaattaaatgatgaattcaatgatagattcatgtactctagccaaatctgagttagaatcacttaccccgatgaatttcttgaaaaaccttcgaaaaatcgccaaaatccgagctctctaggtcaaaatatcaaataaaacccaaaacctcgtatttatagagtaccccacagatttccacctccgcggccgcacaaaatcgaccgcggtccgcacaaaaacgcaccgaccgcggccgcacagctttcctctacagtgacagctttagtattttggccataactttcgctacagatgtccaaattgcgatatctttacctttctggaaactagacacgaagggctacaactttttgtttttgaatcatctcaaaattccttgtagatcaaaagatatgagcttccgaagtaggaccagtggaatgttcttcaccgcggccgcacaccattttgtgcggtccgcacaacacctaccgcggccgcacttcattttgtgcggtccgcacagcacataccggccgcacttctttttgtgcggaccgcgcgggtgagttccgaggcctgcaacccttctggacctgctacagctatgattttcggcctaaaacatcccggaacctacccggaactcccggaacttcaaaccaattgtaccaacacatcccatgacatcgttcaaacttgttcaaaacttcggaacgctcacaacaacatcaatcaccaatttaacataggattcaagcctaagaactccaagaactcttaaattatgctttcgatcaaaaagtctatcaaatctcgtccgaatgacctaaaattttgcacacacatcccaaatgacacaacgaagctactgtcactctcggaattccattccgacccctatatcaaaatctcgcctatcaaccggaaccgccaaaatatcaacttcgccaatttaagcctaaatcttctctacaactccaaaaccattccgatcgcgctcctaagtcacaaatcacctcccgaagctaaccgaaccatcagaactcacttcgagccttctaacacataagtcaacatccggttgacttttccaacttaagccttcttaaaagagactaagtgtctcatttcttaccaaatcctctccgaactcgaactaatcaacccgatcacataaaacacggataacgaagcgtaaagaagctgaaatgggggaaaaacggagcggtaactcatgagacgactggccgggtcgtcacatcctccccaacttaaacaaacgttcgtcctcgaacgagtcaagaaacatacctgaagcctcaaacaggtgaggatatctgctccgcatctcccgctcggtctcccaggtagcctcctccatgggccgacctctccactgcactttcactgaagctatatcctttgacctcaactttcgaacctgacgacccaaaatagctactggctccacatcataggtcaaatcatcatccaactgaaccgtgctgaagtccaaaacatgagacggatccccaatatacttccggagcatagaaacatgaaataccggatgcacactcgacaagctgggtggcaaagcaagctcataagccacctccccaatcctccgaagcacctcaaaaggcccaatgaaccgaggactcaatttccctttcttcccaaatctcataacacccttcatgggcgaaaccttcagcaagaccttctcaccaaccatgtaggacacatctcgaaccttccggtccgcataactcttctgacgcgactgcactgtacgaagcctctcctgaatcaccttcaccttctctaaggcatcctgaaccaaatctgtccccaatagcctagcctcgccgggctcgaaccaaccaactggagatctacaccgcctcccatacaaagcctcatacggagccatctgaatactcgactggtagctgttgttgtaagcaaactctgcaagcggtagaaactcatcccatgaacctccaaatcaataacacaagcacgcaacatgtcctccaatatctgaatagtacgctcggactgtccgtccgtctgaggatgaaaagctgtgctcaactccacctgagtacccaactctcgctgaacagctccaaaactgaagtaaactgagtacctctatctgagatgatggaaaccggaacaccatgcaaccgaacaatctcccggatataaatccctgccaaccgctctgaagaataggtagtacacacaggaatgaagtgcgcggacttggtcagccgatccacaatcacccaaatagcatcaaacttcttcaaagtccaaaagtccaactcccacttccactcgggaataaccatctgctgaagcaagccacccggtctctgatgctcatatttcacctgctgacaattgagacaccgagctacaaatcccacaatatctttcttcattcttctccaccaatagtgctgcctcaaatcctgatacatcttcgcggcacccggatgaatggaataccgcgagctatgggcctcctccagaatcaactctctaagcccatccacattgggcacacaaatccggccctgcatcctcaacaccccatcatcaccgatggtcacatctctggcatcatcatgctgaactctgtccttaaggacaagcaaatgcggatcatcatactggcgctctctgatgcgatcatataaggaagaccgagaaaccacacaagccaacacccgactgggctccaaaatatccaacctcacgaaccgattggccaaggcctgaacatcaactgcaagaggtctctccccaactggaatatatgccaaactccccatactcactgcctttcggctcaaagcatcggccaccacattggcctttcccggatggtacaatatagtgatatcataatccttaagcaactccaaccatctccgctgcctcaaattaagatccttttgcttgaacaaatgctgaagactgcgatgatcagtgaatacctcacaagatacgccatacaagtaatgcctccaaatcttcaatgcatgaactatggcagccaactccaaatcatgaacatggtagttcttctcatggggcttcaactgacgagaagcataagcaataactctaccctcctgcatcaatacacaaccaatcccaactctcgaagcatcacaatacacaatatatgaacctgaagctgatggcaaaaccaacactggagctgtggtcaaagctgtcttgagcttctgaaagctctcctcacactcgtccgaccatacaaatgaagcacccttctgagtcaacttggtcaagggcgatgcgatagatgagaatccctgaacaaaccggcgataatagcctaaacccaagaaagctacgaatctctgtggctgaggacggtctaggccaactctgaaccgcctctatcttctttggatcaacctgaataccctcgctggacaccacgtgccccaagaaagccactgaactgagccaaaactcacacttggagaattttgcataaagcttctcctccctcaatctctgcaatacaactctcaaatgctccgcgtgctcctcctgactacgcgagtacaccagaatatcatcaatgaatactataacgaacgaatcaagataaggccgaaaacacgttgttcatcaaatgcatgaacgctgctggggcattggtcagcccgaaagacataacaaggaactcataatgaccatatctggtcctgaaagcagtcttaagaatatctgaatccctgatcttcaactggtgatagcccgaacggagatcaatcttggagaacaccctcgctccctgaagctggtcaaataaatcatcaatgcgaggcaaaggatacttgttcttaattgttaccttgttcaattgcctataatcaatgcacattctcattgtgccatccttcttcttcacaaacagaaccggcgcaccccaaggtgacacactaggccgaatgaaccccttatctaggagttcctgaagctgctccttcaattctttcaactctgctggtgccatacgatacgcggaatagaaatgggctgagtgcccggcaccaggtcaataccaaaatcaatatccctgtccggtggcatgcccgacaggtctgcaggaaacacatcgggaaaatccctcacaactggaacagaatcaatgctaggagtctcagctcccacatccctcacaaaacgctaaatatgaaaggcaacccttcccaaccatacgctgggccttcaagaaagatatcactctactaggaacataatcagtcacaccacgccactcgatccgcggtacacccggcatagccaaagtgactgtcttagcatgacagtctagaatagcacgacatggagatagccaatccatgcccaaaatgacatcaaaatccaccatgctcaatagcaatagatccactcgggtctccagacccccaatagtcaccacacatgaccggtacacacggtctacaacaacagtatcgcccaccggggtagatacatgaacaggtaaagcaagaaactcacggggcgtacccaaataacgagcaaagtatgatgacacataagaaaaggtggaaccgggatcaaataatacagaggcatctctgtggcagactgaaacaatacctgtaatgacagcatctgaagcaatagcatctggcctgcctggaagtgcatagaaacggcctgggccccctgatcgacctccccctctggggcgacccctggctgcctgacctccacccctagctggctgggcgggtggtgaagtaactggagcagaagtcgagggctgacccctctgctgagatgaactagcaacgacgaggacactgcctccacatatgtccaaactctccacactcaaaacaactcccaggtgctggagaaggggactgaagggaacccctcgcaccggagtgaccagctgatgcactcggcatagaagaaccctgagctgacggggcacgagatgaactctgggctggaagggcactaagtgatgactggccctgctgagatccatgataaccatgacccgaagatgccccacgataacctgggcgggctgactgagcaggcctgaaagaacgacctctaccatgctgaaactggcccctcgaaggagcaccactataactgccccctcgaggcctcttggcctccctctcctctcgatcctgacggcgaaccgtctcaatctcgcgagcgatatcaaccacctcctcgaacgtagcacccaacaccctctctcgggtcataagaatacggagatgatagttaaggccatcaacaaatctcctgatcctctcacgatctgtcggaaccatccaaatggcatgacgagccaactcagaaaacctcgactcatactgtgacacagtcatatccccctgtcgcaaccactcaaactgtctacgcagctcctctctgcgggactgcggtacatacttctccaagaagagagtggagaactgctgccaagtaaggggcgctgctccaaccggcctacgcctctcatacgcctcccaccaagtgaaggcagccccagtaaactgaaaggtggtaaatgccacaccactagactcaagaatccctgctgtacggagcatccgctgacacttatccaagaaaaccctgggcatcctcgccctcagcaccactgaatgacggaggctggagtctaccaaacctctcaagagacgctgctcatcatccggcataactggcacaacaaactcctgagctggtgcaaccggctgggctggaggtgcccccggcgtctgaagtccctgcactacctgctcaggtgtgcgagcagcgggggtctgattgcctccggcctgtgaagtagctgctgctgtagtggctgaaactgcctgagccaggccagtgcaaactgataagatctgtgccaaggcctcctgaagacccggaatcacgatgggcacagctggtgcctgaactggtgctgctggagcatccatagctggagcctgatccggagctagggcagctggtggatctacaggtgctgccctcgctgctctgcctctgccacgaccacgaccgcgtccacggcctctggtggtctcagctggtggcactggtggtcgtccacctcgtccggtagctcgcgtcctcaccatctgtgagagaatggaataacagaagtttagtactcggaccaacaagttcgcacgacaagaatttcaagaatatgaagtttttcctaaaggttctgcagcctctcgaggataaatacagacgtctccgtaccgatccgcgagactctactaaacctgctcatgactcgtgagacctatgtaacctaggctctgataccaacttgtcacgacccttcccgaacccggtcgtgatggcgcctctcgtgaagacaaggccagccagaccaaaacagaacacctcttttaaacagttaaataccataaatagttctaaaacatgatataataaccataatttgaaataacgataacaacagtagaaaccatcccgacacagcccaaaccggggtgtcacaagtcatgagcaactaataaatccggataccagtctactagatacgaaatccgatacagaagttcaagaacatgaaaatagtaagataagggaggcacgggggctgcggacgccaacagctacctcgtagtctccgaaaacactgcctggactgggaggatcagcactcaggagcggactctgcgatgcctgaatctgcacacacggtgcagggagtaatgtgagtactccgactcagtgagtaataatcataaataatggctgaaagcaagaaaacacgtaaaggcacaaagcaattctatatcaagcagtaaaaatcacttaaagcagtaaatcagtgaagagtcaagtgaaatctctttaaatcaggtaaaacggtaatttagcaggtaaataacaagtagaaatccacccctcggcacagtgtcaatcactcagaacagtatcagctcctcgggctcactctcatcacttggtgctcattctcagctctcgacccatatatctctcataataacagaaatcagaataaccgctgcggcgtgcagcccgatccgtacatcgctgcggcgtgcagcccgatccatatagatagtcgactgcgctcactgggggtgtgcagactccggaggggctcctacagcccaagcgctatattgctgcggcgtgcagcccgatccatataagtattgttgcggcgtgcagcccgatccataacatatataatatcctcaccattgggttctcaacccctctcagtcattaacctcacagcctctcgggcacaataatagaagatagggatctcagcccacaaattcctctcatttaggaatagtatgacaaaaccggctcgaatcgtttaaaacagagagaaacatgaccgaggatacgatttttaacaagtatagtgaggaaaatcagtcaaaatccccgaagggttcaaatagttggcacgaagcccaaatatggcaattagccccaaatcatgatgataacaaataagtttcagtcaaatacgcggtaaaatcatcagtcgggacggaccaagtctcaatccccagtagtaaaagaccccacgctcatcatcgagcgcgtgtctcacctcaatatagcactacggtgtgcaattcggggtttcaaacccacaggacatcatttacaatcattactcacctcgaaccggctaaatctctagctcgcgacgcctttgcatctcaaatcggcctccacgtgcgtcgaatctatccacaatcagaatgaatacatcacaatatgctaagggaacaaagcccaagcgaaaacaatcaataacaggcacaaatcccgaaattgccaaaacccgagccccggacccacttctcgaaactcagaatttttcacatcattagatgtcttatctccccacgagttcatatataccaaaagttctcaaatccgaccccaaatggtttttcaaatcccaaataaatgtccaatttctcaagccctagtacttcaatttttaggtttagtttccatgaatttctaggtggatttcacaatataatcgagttttaagaccaagattcttacctcaagtcgattcctcttgaatccctcnnnnnnnnnnnnnnnnnnnnnnnnnnnnnnnnnnnnnnnnnnnnnnnnnnnnnnnnnnnnnnnnnnnnnnnnnnnnnnnnnnnnaccaaaaacgagcagccataggtgaaaatagacccaaaatcgcggacaagacaacttaaaaccattctgcctaggcctgactttccttcttcgcgaacgcggtcaacatctcgcgaacgcaaagcacaaaattgcgttgaccagctttaccttacgcgaacgcgacatgccaattgcgaacgcaatgcttccatggccttgaccttcgtgaacgcattcgctccttcgcgaacgcgatgaataactgaccattagaccaaatcctccttcgcgatcgtgtatacacactcgcgaatgcgatgaagtcccctaacaagccttcgcgaacgtggcatggaccctggagaatgcgaagcttacgaaacccggcccttcgcgaacgcgaaggccaaaatacctgcaactgctggaacaagatctgcaattttccaaactctaaaatggtccaattgaccacccgaaactcacccgaggcccccagaacctcaaccaaaggaaccaacacatcctaaaacctcattcaaacttgttccaatcatcaaaacacctcaaacaacaacaaatcactcataacatatcggattcaagcctaagttttctaaaaacttccgaaatacgctttcgatcaaaaatccaaccaaaccacatctgaatgatctgagatttttcacacacatcctaaatgacataacgaagccactgcaactctcggaattccatttcacctcctggattaaaatctcacctaccaaccggaaatcgccaaaatctcaacttcgccaattcaagcctaattctactccaggcctccaaagccaattccgatcatgctcctaagtcataaatcacccaaggaagctaaccaaatcataaaaattccgatccgagctcatatacaaataagtcaactcttggtcaaacctttcaaattcgaagctttcatctgagactgttctttcaaattccttccgattttcctgaaaaccaaaaccaacgatctacatcattcataatacattacacggggaaagtcatgcccgagaactggcgatcaagtgaaaaagctcaaaacgactggtcgggtcgttacatcctcccccacttaaacacacgttcatcctcgaacgtacctagagttgttctagaagccaatcaataactgaataactttaccatgcatatacccgggggattatcccacgtcaccctatctcatataggtccgataacatattgaaactaaaattacgcaatccagtctggcccctaagccatagaaccacatttccacttctgaaaccatcaatacgatcaaagcctcacacctatactctgaatagactcgaaccagctgtaataacccatgcctgcaacctcgggagcaatcccatgatataccacataactcaaacactcgtagcgataacttctattcacagcagctgcacaacaaccgaatactggtagaaaatctcttaccagccaaagtctcattccaaaactatcaaatactgccaacgataaatgaaatacgcaataaaccataaccattttcttagatcacccattcatgaagcaacttctcctctgacaaataccatagcaaatttccgagccgaacctcgatattaaccttccaacatgctgaaatcgaatccgttcgtattcattaatgatcccaacgatctcctctaatccaacacaccactctggtgacatgacacatcaatagaaggcctaagccacaactcaagctcaccagtaccaccacaacacaaggctgagaacctgtctcacatcatataatagaacatatgaatctagcccgcaagttcatatcccatatagcttcattgcaatgtgcgatcctatcaaacactgctccacatgagacacctcaagtcactatgctcgaaattgacaaccacgcacaatttgatgtctggaaccaaagcagatcattacacnnnnnnnnnnnnnnnnnnnnnnnnnnnnnnnnnnnnnnnnnnnnnnnnnnnnnnnnnnnnnnnnnnnnnnnnnnnnnnnnnnnnnnnnnnnnnnnnnnnnnnnnnnnnnnnnnnnnnnnnnnnnnnnnnnnnnnnnnnnnnnnnnnnnnnnnnnnnnnnnnnnnnnnnnnnnnnnnnnnnnnnaccgagcaacatctaattactcttcccgctcgacttccactatgaaccccaatggaaccgcaccatgtgtgctcataaccaacaaatcataacgtcttgcaacacataaaggcaacccatagatcttcccagatcactaataaactcaataatagttgaatcaacctatccctcaacaatacaattaggggccaaccaagccgactcaagatagaacacgtatccatattggcctgctaacgaactccttaccaaggaagcttaaagctgccccttacactactataactcccgctgaagccatacgatacggtgcccgacaccaaattaataccaaaatctgcaacctcgcccggtgacatgcccggccataagaaacacatccgaaaagttcctcaacactggaactgaatcaatggtagaaacctctgctttgacattcatcacgaaggcccaattaagaaaggcaatccttcctagacgtccgctgggtccttgaaatataaaccactatactagaacataatccgatgcacctcgccacttaacccgtggcatttccggcatagccaaaagcgcaatagttcggaataacccaacatggagacaaccagtctaaaccccaacatcacatccaaaatctaatataccaagcaaataaagatccactggggcctccaaatcccggtagttgctaaacaatgccgatacacacaatctacaaccacaacatagcctgaatatgagaactttcgtctccacatccaaacgacacatgaatcaccatatccgatcccaattttgccatccgaacacatgccacacctttaatacccaatcattccatgatagatactctaaaattcttttgtgcttccaagcaaactcgaatatcagcagccgatctgacaagaagtgctgcaatactaccggagtaccatcaacttaatcacattgcctctgtctgaatatatactctcgtccaatcacctcaattaacattaccctttctttaatcatctaaagatcatttctcaaatcatctgaaggtcatttcttcaatttatctaaactgcccatactacataagaatttatgacctttctttcaaatttgaaccgtgaccttacacatgccaatctcactcctatacaacataccgcataaaccgtaccattctaggataacaacaagaaccttgtatctcttccgagccacaagaaactatgtactcaaccaaccaagaacttcgattgttcccatctagaagaaaatcactatacataccatgctcctcatgcccatagaaaatatatatttccaaccgaggtcgaaaccatcaagaactctccgagttccccttgcacaaaccagacctgccaggactaaatccttctaactcaaccgagctatgcagatcactaaaacccaagagaattgccgagaaacacatgtagaaactcattatctcgcaagcatccgaagaactaatcatatccttaccataccaactcggcctactaccaagctatcccgtatattcgaatttccttctgatttaccttcaacttgatactcattcttgctataacatcacaattcctcaaaccagacttaccacacgggacccaagcataaagccataccgtctaaggctcataagccgctgaatactttctcagatattcccacgagcaccactatcaaagtactttgctctgaagagacttcctgcgaatctaaatctgttacctttaccttcccggtactgatacatagaatttcataatttataaagataataccacaagtctcgacatcttctaatgaaaactcaggttctaaccacatatacaactttaaaatacccaattgttatatgtaaaatcttgaacacattagaaccattctcgagagtcattcactctattcaaactgcaattagcctgatcaaatgaacagaagcacctgtgcttcaatagcactccgacaccgcagggtgtaatctcatcctagaacaaccaagccacttcctgctctatgcaccgagcatccattaccacaacagctcaagacactctaagattcccatacatctatgaagcatgacataacctctgtcaaaatttttcctttactcaagacatccacgatctcaatctccgtaatccatgactgattcaccagtgcacctcaaactggaaccaacatagcacataactgtgcaatcaacaaatcaatagcagactcccccacttggctcgaagccatagatcaaaacacatttaatatctcgtaacacatatactctattaatgccataataccatagtgagattaaactcaaagccattgtaagcttgcgaaaacacagatcatctagtactttaactcttccgcaaatctcgcattcactctcacaatagttaggtcccctctcttaagcgacccatttaaattacaagacatatctttcacttgcaaatgagatcttctaacagacagcataaagatcgcacaacttccgaactcttcgtaggagataacccacctgatttgcctcaaactaacattcccgcataccttccaccgtcgtaaactttacgcagtcacttagtcttcctgagtnnnnnnnnnnnnnnnnnnnnnnnnnnnnnnnnnnnnnnnnnnnnnnnnnnnnnnnnnnnctgaactcataccgcaacatgaaatttacttcacttccaactaggaaaaatgaaaagattcttcacacgccaacaactcgggctatacctcaaaccgagatggaattcaaacactaatagttcttctatcctccagcggacctttcttgtcgcttctaaatcatatagatacgtctcgcaatactaacacactcatcacatagccatccagtcgtcgctcccactaacagggacagtaccaaacatataagttcaaaaacacttgctcacataatcagcacctcggtgctcaagccatagggaaagatctggcctcaagtcctccagactggctcaacatcaactcacagagatcacatctcgccccccgatctaggactcataagccatcattgcaaatctgatactgagcgctcatgcgtgcatacgaatgcgtggaaggaattcaaagagttacagttcaagctgaatcaaggacgcacgataaggattcaagaacatgaagttttcctaaaggttctgcaacctctcgaggataaatacaaacgtctccataccgatccatgagactctactaaacctgctcatgactcgtgagacctatgtaacctagactctgataccaacttgtcacgacccaattcccgaactcgctcgtgatggtgcctctcttgaagacaaggccagccagaccaaaacagaacacctcttttaaacagttaaatatcattaatagttctaaagcatgatataatatccataatttgcgaaattaacgataacaacagtaaaagccatcccgacatagcccaaactggggtgtcacaaatcatgtgcaactaagagaaaatcctgatacagtctactaatcactaaacccgatacaatagttctaagaacatgaaaatgataagataagggaggcacgggggctgcggacgccaacagctacctcgtgatctccgaaacactgcctggacgggaagatcagcactcaggagcggactctgcgatgcctgaatctgcacacacggtgcaggaagtaatgtgagtactctgacccagtgagtaataatcataaatagtggctgaaagtaagaaaacacgtaaaggcacaaagcagttctatatcaagcagtaaaatcacttaaagcaatagatcggtgaagaagtcaaatggaatccctttaaaccaagtaaaacaggtaatttagcaggtaattaacaattagaaatccgcccctcgggcttagtatcaatcactcaaaatggtatccgctcctcgggctcactctcatcacttagtgctcattctcatctctcgacccatatatctctcgtaataaaagaaatcagaataaccgttgcggcgtgcagcccgatccgtacatcgctgcggcgtgcaacccgatctttatagatagtcgactgcgctcactaggggtgtgcaaactccgaagggtctcctacagctcaaacgctatattgttgcggtgtgcagcccgatccatataagtattgttgcggcgtgcagcccgatccatataagtattgctgcggcgtgcagcccgatccataacaaatataatatcctcaccattaggttctcaacacctctcagtcatttacctcacaatctctcgggcacaataatagaatatagggatctcagcccacaaattcctctcatttaggaatagtatgataaaaaatggcttgaatcgtttaaaacagatagaaacatgacagaggatatgtttttaacaagtatagtgaggaaaaattagtcaaaatccccgaagggttcaaatagttggcacgaagcccaaatatggcaattagcccaaatcatgatgataacaaataagtttcagtcaaatatgtgttaaaatcatcagtcgggacggaccaagtctcaatccccaatagtaaaagatctgacgctcatcatccagcgcgtgactcacctcaatatagcactacgatgtgcaatccgaggtttcaaaccctcaggacatcatttacaatcattactcacctcaaaccggcgaaatctctagctcgcgacgcctttgcccctcaaatcagcctccactcgcgtcgaatctatccacaatcagaacaaatacatcacaatatgctaagggaacaaagcccaagcgaaaacaatcaataacgggcacaaatcccgaaattgccaaaacccgagccccggaaccacttctcgaaactcagaatttttcacatcattagatgccttatctccccacgagttcatacataccaaaagttctcaaatccgacaccaaatggtctttcaaatcccaaatcaaaagtctaatttctcaagccctagttcttcaatttttaggttagtttccatgaatttctaggtggatttcacaatataatcgagctttaaaaccaaaattcttaccacaagtcgattcctcttgaatccctctttaatttccttcaaaatctcctaaaacgagtagccatgggtgaaaatagaaccaaagtcgcggacaagacgacttaaaaacattctgcccaggcctgactttccttcttcgcaaacgcggtcaacatctcatgaacgcgtagcacaaaattgcgttgaccaacttttaccttacacgaacgcaacatgcccgtcacgaatgcaatgcttccatggccttgaccttcgcgaacgtgatgaataactgaccattagaccaaatcatgcttcgcgatcgtgtatactcactcgcgaacgcaatgaagtcccctcacaagcctttgcgaacgcggcatggaccctcaagaacgcaaaacttatgagacccgtcccttcacgaacgcgagatccacttcgcgaacgtgaaggccaagatacctgcaactgctggaacaaaatctgcaattttccaaactccaaaatggtccgattgaccacctgaaactcacccgaggcctccgggacctcaaccaaaggtacaacacatcctaaaacctcattccaacttgttccaatcatcaaaacacctcaaacaataacaaatcactcaacacacatcggattcaagcctaagttttctaaaaactttcgaaatacgctttcgatcaaaaacccaaccaaaccacatccgaatgacctaagattttgcacacacatccaaatgacataacgaagccacttcaactctcggaatttcattccgactcccggatcaaaatttcacctaccaaccgaaaatcgccaaactctcaacttcgccaattcaagcctaattttactccgggcctccaaaacaaattccgatcacgctcctaagtcataaatcacccaacgaagctaaccaaatcataaaaattccgatcctagctcatatacaaataagttaactcttggtcaaacctttcaaattcgaagctttcatctgagactgttctttcaaattccttccaattttcctgaaaaccaaaaccaacgatatacatcagtcataatacattacacgaggcaagtcatgcccgagaactagcgatcaagtgcaaaaactcaaaacgatcagtcgggtcattacacgaggtattctgacttactttttgataaaactcatgtatataaaattcttatttgttgttttttaccgtggtctatattttttgtgatcattttgtgatttaattaatttgttatttttttatcccgattaaaatatttatgtgctaaaaaagtagtaaaaaggtatattattttatgaataaatattgttatatgtgattttatttttgtacgtatattaatatgtgactttattgttgtttagtgccttttagtgttatgttgtgttcttaattgttatgtagtgccctttagcatagtaaaactgatgataaattttagcttatggtaattgactttgtttatggccatttagagtagtgttattgtagtactctttaagattatttagtgtagaataaaaaattatgtgctctccttaacaaactcgggtagagtacttaattatatatttaatgtatcagtatataattatcaaatattagataggaatcataaaattatcatttgccgagaactggcaaaatatgaagttaacaaacaaatcgttgagaatggaataaattcaatattatttactattaagtttgtggtattttttatatgattaattattgagtatatcttgattacttatgaaattgtaatatattataattctattataattcaaaattaactttaaaaagatgatagttcaaacaaaaccatgtagaattttagtacaaaaatgttggaaactaacatatgaaatattaatacataaaatttatcaacctaagtatttgttaaatgaatagttattaaattatatttatagttattgaaattaatcatttaattatttgttaaccccaaaaatatacgaaaaaagattaaaaacaacatataaaatatagagaatttgtcaaactaagtattttctatatgaatacttattaattataacacgtatatttatgaaaattaattatctaattctattacatccaaaaatagctgagtaagaaaaaaaaatataaaataacaaattaacatataaagtaatgtaataaactaacatataaaatagtaatatataaaatgtatcaacctaagtaataatagagaaacaatatcgattaaatattaatataaaagatattgaaatatatttaaagatgttaaacaattaaacagaaaatactttaattaatattgttcaatttacggacatcgtcatggaggttccccctgtgcatcctggacttgcatctcgagagctactcttgctacagggcaaccataggtctttacacatctgagatggacagtgtctgccccggatattccgccccagacgtatagacgatatgtgggagttcactagggaccacccactgcatccccttatagttagacacctccagaatacgggtttctacaagatcatagagatcggccggttgcagttcgactgggctttaatgggttcatcataccattctttaaaagcacattgatttttgtcctaccaatggggatgataacacaacactattaattaacatgttatataaaaactattaacaaacattttttcaaaaaataataacttactagttgttgatacgtctagcgtctgcgccctagattgtaatttgaccaacatggcttcaaaattgcatgttttccacagtaacacattggtatgccattgcgtccagacatgatgtaatgctcgaaaaataaaaaattaatggaaagttgttctattcgttttgttacaatacaaataataactaaaatgtgcgaggtttttataggcagctaagagtgattttaggttacataacacatattggtgatgtgctatgttacccgtgctaatgtttctttagggtacaagtgggtgcagctttttagatcgacaactttttcagctccacaattttttcaggccgatatgacaatacacataatgcatattggtgacgctctatgttacccgtgataatgattctttagggtacaagactgctttttcaggtcgacagctttttcaggttaacatgacaatacacataacgcagattggtgacgcgctatgttacgcatgataatgattctttagggtacaactgggtgcagcttttcagatcgagagcttttccaggtcgataacttttttaggtcgacatgacaatacagataatgcatatcggtgacgcgctatgttacacgtgatatgattctgtagggtacaaatagatgcagctttttcaggtcgatagctttttcaggacgacatgaaaatacacataacgcatattggtgacgtgatacgtttaatatacaagttcatgcagtttagttcttcttaagttgaaccaagaaatcagtattcaaagactatttgaagaatcattgcaacattcatttaaaaaatgctactaacatttaataagtggttcaagaagaggtaaaaaggtaaaggtagttcatcaaatccacatggaacacgtcataatacaataaattcctacctgaaaaacatatgctaggttgttatactggtttggttgatgacaagtggtatggtattctacgtcccttggaaaataagcctatcaatatacacagtgatctcaaagttgcagggcacattattgagggcaaaacgcattctatagagcctgaaggtatgcgaatttagggagaaaaactacaataagttcccctttactcaaaacggtgtaattatggagtactatgtcactggcatggtctaggtgcaccacaagcactgtctgcaaccttccaaacaaacacacacaaagatgaactagaagtgattcggcctttgatgtagagattttagagatgaaaaaggcactagccgttcatcatgcactggatgaacttaactacctggaaggaatggaggatcaatgttggaatttattagaaaataaaaaattacgtagagacaataattatcctatttacccaatagctgtcgagtgggagggactacctaagtttctaccacagacgttggatgtaagagtcccatattattgtagaaatcaagcaagtggttttactaatgatatcgatgaaatacgagaaatgtgtgtcaaatagggcctatattatgatgccctcgatccgaagggtgcatacaagatgttgacgaagaagatgaagacaatgataatgaaatagtgccagatagtgacgataatggcgaataaaaattgttatttatttcttgtggtatatgttaaattgttgggttgaatctttaatgctaaatatcaattagatttaatcctattggaaacataattatattttagaaattttgcaaactgaacatttacagacatttagtacaacaaaaatactgcaataaaacactacatttatccttgataattgggaacattagatgaactgccacctggagctgaattaccaccattttccaaactagctgaaggacatttacggcggtcgtatcctgtttgggaacatataccacatttacgcatataaaagggtatcaccaacatccatttggttctgtatgcacgttcttttttgcacttaccgttgacgcacataatccttattacacaccattttaaatgattccggtggccaataatgctcagtacccactagctgcaactgtccactatatatgtttaagtatgcaacaacattatattctttatcaatgtacctcgttgctgcgaaacctgtatgttgaaagtacttcatggtatgtgagcatgaaaagtgatagattgaccattttccataggagcaaaatcttttggatttattgacaacatgtatattattctcgcggttgtcatgcagaccaatgcgaacttcaaaaatatttagcttgctgcaatactacaaaaattcatgccaccgtactcgcttcttatatttctcaaatcgtttcattgattgtggtataagttcaacacccctttccatcaatgacgatgcacctctagatctttcaacaaacctctctgccatctacttgaatgacatacgcaccatggcagtgacatgcaatccacgtgcaaacttcaataacctgttgaaagactctgatatagttgtagtcaaaatttcgtcaaaatttcccatcttctactaccattcatatgcaaagtccactagtcaagctcatgtcgcatcaaccaacgataggcttctaggtcttcctatctaatcaattccttttcctcctgaagttacactcttggtgatctgttacagccatttaaatcatgtaattccttgtttggataagccccctagaagttggccttcaagtaccttacatagtaacagtggtaggaatacggttcctgtcatacacgcaaattttgtacagaacttaaaataccgccatgccgatcagatattagacaaatacctgaacattgtttgacaacgtgctccttcaagtggttcaacaataatgtccatgtctcttggctttcattggaacaaatagcaaatgctaggggaaatatacttccattagcatctactgcaacgacgatcaacaacttaatatcctactttccatagacatgagtgccgtctatggatattaccagcccacaatgcacaaaaccatcaatgactggtttaaatgcccagaatacatatctgagtatgtattctagtattttcggactccgctcaagcttccattcaaccacagtcctgaggttaagtgttgcaatgcagccatgtacttgggtagagcagaaaaggacttatcccaattaccataaacaatttcaaacgcacgtttatgctcgagaaatgcttttttgaggtgatggtacatctatattcctggtggacagattgtcacgaccccaaaccggactcggtcgtgatggtgcctctcataaagacaaggctagctgacacaattcccaaatcaaccattttccatttaaaagtggtttttataccatctataaaccattaatgtcataatgaacattgaaaagaaaaatacggaataattacacaagctcgacatcgggtgtcactagtcatgagcatctaccaaggtctgaatacaacaaaaacagtcaagtgtactaagtacagaaatggaaatgagctgaagaagtagtgttgcgaacgtcgtgcggccaccttgctaactctgatgactccgcgtctgagcaatcaatacccgctaccgggttctgaaatacctgaatctgcacacgaggtgcagagagtaatatgagtactccaacccagtaagtaataagagtaaataaagactgagcagtaggaatcaatgaatccacattcatgataactcaataagcacgtaggttgctaattcagaatacgagtcgatcgtcttatttaaaatctagccttttggtaaaaattatttaaacaggtgaaaatactttttgacagtttcagtaggcgttcaataccatttataataaaagagatgaaaaccataatcggcccctcaggcaaaacatagttcataaactgcccctcgggcaaaaaaataaacaggaatcataaactcttcataacatgaaaatctcagtggaaataacaaagccaaatcagtgattaaattctgaacatctcacaaaccccagcttaaatgaaagttgttttaaaacatttgttcaacactttcgatagaggctcaatataaagatgagtgaaaacagtcaataannnnnnnnnnnnnnnnnnnnnnnnnnnnnnnnnnnnnnnnnnnnnnnnnnnnnnnnnnnnnnnnnnnnnnnnnnnnnnnnnnnnnnnnnnnnnnnnnnnnnnnnnnnnnnnnnnnnnnnnnnnnnnnnnnnnnnnnnnnnnnnnnnnnnnnnnnnnnnnnnnnnnnnnnnnnnnnnnnnnnnnnnnnnnnnnnnnnnnnnnnnnnnnnnnnnnnnnnnnnnnnnnnnnnnnnnnnnnnnnnnnnnnnnnnnnnnnnnnnnnnnnnnnnnnnnnnnnnnnnnnnnnnnnnnnnnnnnnnnnnnnnnnnnnnnnnnnnnnnnnnnnnnnnnnnnnnnnnnnnnnnnnnnnnnnnnnnnnnnnnnnnnnnnnnnnnnnnnnnnnnnnnnnnnnnnnnnnnnnnnnnnnnnnnnnnnnnnnnnnnnnnnnnnnnnnnnnnnnnnnnnnnnnnnnnnnnnnnnnnnnnnnnnnnnnnnnnnnnnnnnnnnnnnnnnnnnnnnnnnnnnnnnnnnnnnnnnnnnnnnnnnnnnnnnnnnnnnnnnnnnnnnnnnnnnnnnnnnnnnnnnnnnnnnnnnnnnnnnnnnnnnnnnnnnnnnnnnnnnnnnnnnnnnnnnnnnnnnnnnnnnnnnnnnnnnnnnnnnnnnnnnnnnnnnnnnnnnnnnnnnnnnnnnnnnnnnnnnnnnnnnnnnnnnnnnnnnnnnnnnnnnnnnnnnnnnnnnnnnnnnnnnnnnnnnnnnnnnnnnnnnnnnnnnnnnnnnnnnnnnnnnnnnnnnnnnnnnnnnnnnnnnnnnnnnnnnnnnnnnnnnnnnnnnnnnnnnnnataaataagttcataaagaggccccttatgcaaagcatcactcatatgcatgtatatatctatcgcccctcgggcaagcctctcagtcactcacgactcaactcttactaatcagcgctcacacttagcactcacactcaataggtaccatatagtaaccgctacggcgcgcagcccgatccatatgtcgctgcggcgtgcagcccgatccatatatatatatatatatatatatatatatatatatatatatatatatatatatatatatatatatannnnnnnnnnnnnnnnnnnnnnnnnnnnnnatccatagatatataatctctaggcccccggcctctcttagtcattagcctcaccattagactctcagtctatctcagtcatcaatctcacaatcagaccctcagtctatctcagtcattatctcatgatcactcggatcatcagtaaaacaggaaaatagtttccacatttttaagaatatagtgataaagccagatttgagcagtaaacaggtaaaacataattgaggatatgctttcaaataaataaagggaggaaagatagtaaaaatacccttaagggtctcaacaagtcggcacaaggccccaaacatggcatacaacctaaagtacaataacatcaaatggttaactatcaaatacgcattaaaatagtcgttcgggatggactaggtcacaatccccagtggtggtctaccccacgcttgtcatgtagcatgtaagtcacctcaaagtaacacaacgatgtgtaatccggggtttcaaaccctcaggacagtatttacaatcattacttacctcgaaccggctaaannnnnnnnnnnnnnnnnnnnnnnnnnnnnnnnnnnnnnnnnnnnnnnnnnnnnnnnnnnnnnnnnnnnnnnnnnnnnnnnnnnnnnnnnnnnnnnnnnnnnnnnnnnnnnnnnnnnnnnnnnnnnnnnnnnnnnnnnnnnnnnnnnnnnnnnnnnnnnnnnnnnnnnnnnnnnnnnnnnnnnnnnnnnnnnnnnnnnnnnnnnnnnnnnnnnnnnnnnnnnnnnnnnnnnnnnnnnnnnnnnnnnnnnnnnnnnnnnnnnnnnnnnnnnnnnnnnnnnnnnnnnnnnnnnnnnnnnnnnnnnnnnnnnnnnnnnnnnnnnnnnnnnnnnnnnnnnnnnnnnnnnnnnnnnnnnnnnnnnnnnnnnnnnnnnnnnnnnnnnnnnnnnnnnnnnnnnnnnnnnnnnnnnnnnnnnnnnnnnnnnnnnnnnnnnnnnnnnnnnnnnnnnnnnnnnnnnnnnnnnnnnnnnnnnnnnnnnnnnnnnnnnnnnnnnnnnnnnnnnnnnnnnnnnnnnnnnnnnnnnnnnnnnnnnnnnnnnnnnnnnnnnnnnnnnnnnnnnnnnnnnnnnnnnnnnnnnnnnnnnnnnnnnnnnnnnnnnnnnnnnnnnnnnnnnnnnnnnnnnnnnnnnnnnnnnnnnnnnnnnnnnnnnnnnnnnnnnnnnnnnnnnnnnnnnnnnnnnnnnnnnnnnnnnnnnnnnnnnnnnnnnnnnnnnnnnnnnnnnnnnnnnnnnnnnnnnnnnnnnnnnnnnnntgcccctcaaatcagcctccacgcatcgaatttatccaaaatcagaacgaatacgtcacaatatgcaaaggaaacaaagcccaagcgaaaacaattgaaaaataccaaaaattccgaaattagcaaaaactcgagccctgggcccacttctcgaaactcagaaattttcacatcattagattccttatcaccccacgaattcatacatatcaaaagtcctcaaatccgacctcaaatggcccctcaaatcccaattcaaaagttcaaaatctcaagccctagttcttccatttttaacttaagttccatgattttctaggtagatttcacaatagaatcacgttgtaggttcaaaaatcttacctccaatcgattatccttgaatctctctttaatctccctcaaaaagatctcaaaatgatcaactatggaggaaaaatgacccaaaattgctgatgaaataacttaaaaactttctgccccgcactgctcgttccttcatcgcgatcacggcacaagcatcgcgatcgcgaagagcaaatcttcaagacctcagcagtacactacacgaacgcaacaaataccatgtgaacgcgatgcttcagcttaccatacctatgcaagcacgagccctctagtgcgaatgcgaagagaaattcctcttggaccccatttcttatacgcgaacgcggacagcctcatgcaaacgcgaagcaccagctcccagccttccatgaacgcgaggccacctatgcgaacgcgaaggtctaaattctggccttccaaattccttctacgtgatcgcgatataccccatgcgatcgcgaaggcttaaatgtctacaacacctgaacaatttttctacaacattccaactccaaaaatagcccgattgaccagctgaaactcaccctaggcccccgggacctcaaccaaaagtacaaacacatcctaaaaccttgttcaaacttgttccaatcatcaaaatacctcgaacaacaacaaatccaccaattcacatcgaattcaagcctaaatttctaaaaacttccgaaatacgcttttgatcaaaaacccaaccaaaccacgtccaagtgacctgatattttgcacacacatcccaaatgacataacgaagctacagcaactcggaattccattctaacctctatatcaaaatctcacctatctaccggaaaacgccgaaatctcactttcgccaattcatgcctaaaccttccagggacttccaaaatgtattccgatcatgatcctaagtcccaaatcacctaatggagctaaccaaatcataaaaattctgatccgagatcatatataagcaagtcaaatattggtcaaacctttcgagtttcaagcttcaaactggaaactgttcttccaaattcattcagattttcctgaaaaccaaaaccaacgatttaaataagtcataatacatcacacggggctagtcatgcccaagaactggtgagcaaagtgcaaaagctcaaaacgactggtcgggtcattacacagatgttataaactctttgatcttgtaccttatggatgcttcaatgtatgtaatcaagacaagagaaatcaagccaacattaaagttaaaatgattcctactaaatgtgtccatttcacaagtgtgggtgccaatgtgtttccccacaatccacatatttgttttcaactttctcgcacgcagcatccaattacaaccttgaaaccatctatgacaaataaccttgtatacgtccgtagatgactcatgaaccacgatatcataacactcttttatgttgtactttcgcaccgctctgcttaggcacgctttatcagcaaaaaatatattctttgatagcaccgttactctagattcatcccccattgttgtccaaattttgtcaagatcccttgtgagggtatccatatccggcatacttggaaaataatcaaggtagaaaatctcccttgaatgaaacgacacatgggactcgtacactcttggtctaacgggaggtggagcatgctccctcgtcaaatttggttcatcattctcgtcctcatcatcatcaccctcatcagggaagggtgtgtcatctctaaactcatcaacattgttgtcataatcactatcatcttcccgactctgcgcatctgccagatcccaattaaatatgtcgtctccgggtaattaagtaaggacatgaccttcaagttgctcgttttcacttcacaaccaataaaataatgagtttctcaaattcatccaaacattacatataaactgtatcacttaacttacaaatcataatatgttgatatcccatgatgcacattatcctgttgctgatgactcctggatggaccaccatgatccaacataccaaaactaggcatattccaactgtccgttggttcataacttgtaaaattcatatctagtcggtaccccctgtggaatatatcagtgttaatacaaacataatacataaaaataaacatcgtaacacaaagaaaaattgaagtttactactcggtttgtggattatgtaaacttggggaaaaattatatcctcgctcctcattcacccgtgaaaataagtttagatctggctaaactctttcacttgaaacctgttcggataaaattgctccaattaagccacttgataattgcgagatatcattattttacggaccctcaatgttgcgaacgtcttcagccttggcatacatttccaatatttttatcacaagaagttttcggttcatccgaagtcctcataaaatctatcagagcttcatcctattcgatgtttaactcagcataccaagtaaccccttgcggagtaatagattacggatatcttcctgttactttaatattaaccgaacgtttgtgcacactcatttttttacataacaacgatactagtctatcgtacttcattgtaagtggcaacttaatatgacactgtagataacaactatagcatactgagttattctctaccacaatctcaacccccccccccccccccccccaaaaaaannnnnnnnnnnnnnnnnnnnnnnnnnnnnnnnnnnnnnnnnnnnnnnnnnnnnnnnnnnnnnnnnnnnnnnnnnnnnnnnnnnnnnnnnnnnnnnnnnnnnnnnnnnnnnnnnnnnnnnnnnnnnnnnnnnnnnnnnnnnnnnnnnnnnnnnnnnnnnnnnnnnnnnnnnnnnnnnnnnnnnnnnnnnnnnnnnnnnnnnnnnnnnnnnnnnnnnnnnnnnnnnnnnnnnnnnnnnnnnnnnnnnnnnnnnnnnnnnnnnnnnnnnnnnnnnnnnnnnnnnnnnnnnnnnnnnnnnnnnnnnnnnnnnnnnnnnnnnnnnnnnnnnnnnnnnnnnnnnnnnnnnnnnnnnnnnnnnnnnnnnnnnnnnnnnnnnnnnnnnnnnnnnnnnnnnnnnnnnnnnnnnnnnnnnnnnnnnnnnnnnnnnnnnnnnnnnnnnnnnnnnnnnnnnnnnnnnnnnnnnnnnnnnnnnnnnnnnnnnnnnnnnnnnnnnnnnnnnnnnnnnnnnnnnnnnnnnnnnnnnnnnnnnnnnnnnnnnnnnnnnnnnnnnnnnnnnnnnnnnnnnnnnnnnnnnnnnnnnnnnnnnnnnnnnnnnnnnnnnnnnnnnnnnnnnnnnnnnnnnnnnnnnnnnnnnnnnnnnnnnnnnnnnnnnnnnnnnnnnnnnnnnnnnnnnnnnnnnnnnnnnnnnnnnnnnnnnnnnnnnnnnnnnnnnnnnnnnnnnnnnnnnnnnnnnnnnnnnnnnnnnnnnnnnnnnnnnnnnnnnnnnnnnnnnnnnnnnnnnnnnnnnnnnnnnnnnnnnnnnnnnnnnnnnnnnnnnnnnnnnnnnnnnnnnnnnnnnnnnnnnnnnnnnnnnnnnnnnnnnnnnnnnnnnnnnnnnnnnnnnnnnnnnnnnnnnnnnnnnnnnnnnnnnnnnnnnnnnnnnnnnnnnnnnnnnnnnnnnnnnnnnnnnnnnnnnnntcctaaatgaatttttaccaaattctgaaactccttaaataagaaaaaataccagtccgggggtacaataattgaggtatagcgcatgtataataggcgctatatatgtagcgtgtatattgcatgcgctataccctcaattattagtgggtcaacacggttcagataaaatattggtggggcaggaaagttcaaatatagcgcggctattcaccgcgctataccttaatggacaaacgtgtcgttaaggtatagtgtggtgaatcaccgccctatatataccacgctatatataaaatggtagtcagttatttttttcacctattattgttgtttgagtccaaaaaggtattgttgtttgagtccaaaaaggccacaatttggttccagactctaatatttaaatcttttctaatagtacaagggtatatttgacatttctttccgatttaattaaattactcagctagccagtgtgtaagagaagtttatttaaactaattaatgcatgatggttatgtccatcaattgaaatcaacaatggaaaagattgtagaaaacatgtgattttactgatcgatgttaggaataaaaacttgtaaaaccaatgttgggagttgtgatgacccaagagatcatcacttgttttaaaatgaaatttctgtgttctgaggatttaaaaacctcttttagcatcacctcgatttgcatgcacagtccgggtgcgtagtcggaaagcttatatgtgaaaatctgtgaaaaatgataaattttgactataaatgaattattttgacttcggtcaacgttttgggtaaacgaacccggaccggtgatttgacggtcccggaggatccgtaggaaagtatgggacttgggcgtatgcccataatcgaattccgaggttccaagcccgagaattgaatttttgaagaaaattattttctgaaattttttaaaggatttggaaatgaattttgattagaacgtgttggtatcgggtccgtattttggttccggttcctggtaaaggtcttatacgttatttaagataattctgtgaagtttggtaagaaacggatgtcatttgacgtgatttggaccttaaatgcaaatttgattttttaagaagtattgaaatattttattgattttgaagtttaattcgatgttgatgatgttattttggcgatttgatcgcacggataagttcatatggtgttttggagttagtaagtatgtttggtttggagcccctagggctcgggtgagtttcggatgtgtttcagaaggttttaaactcttaaaaagtcgcaggttttcagttgctcgtattctggtattttcttctttgcgttcgcggaggactctcgcgaaggcgatgagttaattgtgctgaaggaaaattccttctatgtgaacgcgagaccgaggtcgcgaacgcaaagctttggggggtctacccttcgcgaatgcgggcctggtatcgcgaacgcgaaggcttgtggcttggttaggggaaagggaaaattatacctatgcgaacgcgactacttggacgcaaacgtgaaggctcaaggagttacttctccgcaaacacgagccatcttctgcgaacgtgaaggtctgtcatacctaaccatcgcgaacgcgatgaccaaatccgcccagttattttaaaagtccagaaatagaatgcattacaagatttaacccatttttcacaaacttcttcttctccacacctcttgggagatttttggaagaacttcttcaccataacctcatgggtaagtaatctttgacttgttttcttccatttttatcaacatctactagatttctaggcctaaagcatgagattaagggtagaaaattagggatttgggtagagttagggttttttgattatttgggaatttgacctcgttttggggtcggattaaaaaacaaattatatattcggtttcgtgggtgaatgggtgatcgagttttggtccgaacctcatattttgaccaagcaggcccggggtaaatttttgactttttgggaagaatgattagaaagccataattaagcattggaattggattgtttaggatttattgatgttattaagtcaattatgtctagatacaattgttttggagccgaattcaaaaggaaaagcggtgtttgaggcttgagttgacttttgaagtttgaggtaagtgttcagtctaaccttagcttgagggattaggagttgtgtcttatttgctatttgtttcttattgagtacgacgtataggcatggtgacgagtatctatatgttggtgtcaagcatgaccgtgggtcttatattgtgattttcatgacttcgttgtgttattcatgccttggtgaaggtttctattgttgtgtaaagtttgtggaaagaattgtgacctatgaacattgaggagcgttggctcaagttgtataacgaattgtgaaagtataagtgataattgaacctctagagcattggctcgagttgtgaagtgaattgtgaagtaaaagtgagaaagagaagagatcattatgttgcccccttgccgggctattgttgagttgtggttcccttgcattgtgttcttaattgatattacggatgcttaggttgatgattctttgtgttgggtaaggattatggttattctcggggaacaagtttggttatagctgaggtagttagatgttgtaacaagtttgattatagctgaggtagttagatgttttggttatagcaacaagtttgattatagctgaggtagttagatgttgtaacaagtttggttatagttgtttctcccttgccgggacgtaattacttatgctgtcggatcccttgccgggatagtgtagaccttattgatcccttgtcgggactctcgttataattgtaaatattatatgtggatcgggttgcatattatatgtggatcgcacgccgcaacaatattatatgtggatcgggttgcacgccgcaacaatattatatgtggatcgggttgcacgccgcaacaatgatatatgtggatcgggttgcacgccgcaacaatgataaatgatatggatcgggttgcacgccgcaacaaagatatatgtggatcgggttgcacgccgcaacaatgataaatgatatggatcgggttgcacgcaacagtgttgttatatattgggatcgggttgcgcgccgcaacaattattgatacaagtgtgtttagcttggatattagtttcttttgttttgctgtgaattctaagctgcccttagactgttactcttgatttactgttaatactggtatacccccgtagcatgtatccccctcccatccttacttgttcatttctgttttattttccgatgtacattatatactgcacaggtttatttggtagtctggtcctagcctcgtcactacttcgccgaggttaggctaggcacttaccagcacatggggtcggttgtgctgatactacactctgcactcttttgtgcagaccccagtgttgtagacttcggaccgcggtgggattgctgattcttgttcatcaggcgacccgaggtagccctgcaggcgtccgcaggccttggcgtctccttccatctactattcctatttctttcatgcatttccagagacagtgttgtatttatttctttcagacctttatttgtagtgttcttagaccgactgtgaaactgtgacaccagttctgggtagtcgagattcaaacagttgtattggattcatgttctgatagcttattgctttttcttccgcttatgttaaattccgttgtttaaatgttattacttcgaaattgttaatgaatataaaatgggtaaaaaggtaaattgtgcaaataattggcttgcctagctcgtattagtaggcgccatcacgactcccgagggtgggaaatccgggtcgtgacaagttggtatcagagctctaggttacatgggtctcacagttcacagacaagcttagtagagtctgagggatcggtacggagacgtctgtatttatcccccagaggctacagagttaggaaaaacttcacattcattctttcctgtcgtgcgattttgttctctcagtgctaaattgaaacccctactcttgtcctttcgcgcatggcgaggtcacgtaccgcttcttcagccgaacaacagctcagaccggtgataggtcagctacgtcttcggaggctttgtggaggttggataggttcaccaagctcttcactactactttcagcggtgcatctactgaggatccccaggattatctagacagttgtcacgaggttctcaggaacatggggatagttgagaccaatggggtcgattttgccacttttcgcttgtctggatccgccaagacttggtggagggatttctgtttggctagaccagccggatcaccagctttgacttgggagcagtttactcagctatttctggagaagtttctccccatcactcagagagaggcctatcggaggcagtttgagcgtctccagcagggttctatgactgttacccagtatgagaccagattcatcgacttggctcgtcatgctcttcatacttcccaccgagagagagagggtgaggaggttcattgatggacttattcagccgattcgtcttcagatggctagggagactgggagtgagattactttccaggaggcggccaatgtggccaggagagtggagatggttctgtcgcagggaggtggtcatgggtcgacaagaggccccgtcattcaggcagattcagtggtacctcgtctggaggtagggattcatatggtagaggccatcctcctaggccttttcagtcagcacttcaggtttctcacggtgcttcaggtggccgtggttctcagatgcagtattctgatcagcagtcctacagtgcaccaccagctcctatcagtgcaccgccgctccagagttttcggggtggtcattcaggtcgcagggtcagtcagtttcctcagcagcactcaggtggatgttttgagtgtggtgatatggtcatatccctctcagcagcagggttcccgtgctatggttcaggcaccaggtgttccacagccgcccagccagctagaggtgggggtagagaggtgctagaggtggagcttagaggtggaggccagccagctgcaggccatcccagagatgtagttcagggtggtgggcccagccccgatgttatgctcttccagccaggcctgaggctgaggcttccgatgcagttatcacaggtactgttctggtttgtgatagagatgcttcagttttatttgatccagggtctacgtactcctatgtgtcatcttattttgcaccgtatctggtcatgcctagtgattctttgagtgcctgtatgtgtctacaccggtgggtgattctattgtggtagatcgagtccatcgttcttgtatagttgtgattgggggtcttgagactcgtgtagatttgcttcttttggacatggttgattttgatgtcatattagggatggactggttatcaccttaccacgctatcttggactgtcatgccaagactgtgaccttagccttaccgggtttacctcgtttagagtggagagggactcctggtcattctacccgtagtgttatctcttatgtgaaggctcggcgtatggtcgagaaggggtgtttggcctatttggcatatgttcgtgattctagtgctgaggttccttctattgattctgtgcccgttgttcgtgagtttcctgaggtattcccttcagacctgccgggtatgccacccgacagggatattgacttttgcattgatttggctccgggcactcagcccatttctatccccgtatcgtatggccccgcctgagttgaaagagttgaaggagcagttgcaagacttgcttgagaagggtttcattagaccgagtgtttcgccttggggtgcgccggtgttgtttgttaagaagaaggacggatcgatgagaatgtgtattgattaccggcagttgaacaaggttacaatcaagaataagtatccattgccgaggattgatgatttgtttgatcagcttcagggtgccaaggtattttcgaagattgacttgagatctggctaccatcagttgaggattagggcatccgatgtccctaagacagctttccgcactcggtacgggcattatgagttcttggtgatgtcattcgggttgacaaatgccccagcagcttttatggatttgatgaaccgagtgttcaggccttatttggattcgttcgtgatagtcttcattgatgatattttgatatattcccgcagccgggaggagcacgagcagcatcttagagtggttcttcagaccttgagggatagtcagttatatgctaagttctcgaagtgtgagttctggttgagttcagttgcattcctgggtcatgttgtatcagcagagggtattcaggttgatccgaagaagattgaggcagtcaagaactggcctagaccagcatcagctacagagattcggagtttcttgggattggcaggctactatcgtcggttcgtggaggggttttcatctatcgcagccccgatgaccaggttgacccagaagggtgcccagttcagatggtcggacgagtgtgaggcgagctttcagaagctcaagacagctctgactacggcaccggtgttggttttgcccacaggttcagggccttatacagtttattgtgatgcatctcgtattggacttggtgcagtgttgatgcaggatggcaaggtcattgcctatgcttcgcggcagttgaagattcatgagaagaactatccggttcatgatttggagttggcagccattgttcacgcattgaagatttggaggcattatctgtatggcgtggcatgtgaggtgttcacggatcacaagagtcttcagtatttgttcaagcaaaaggagttgaatttgaggcagaggaggtggttggagttgttgaaagactatgatatcaccatcttatatcatccgggaaaggccaatgtggtggccgatgctttgagtaggaagtcagccagtatgggcagtcttgcttatattccggtcggtgagagaccgcttgctttggatgttcaggctttggccaatcagttcgtgaggttggatgtttctgagcccagtcgtgtgttagcttgcacggtcgctcgttcttctttattggagcgtatccgtgatcggcagtatgatgatccccatttgtgtgtccttagagacacggtgcagcacggaggtgccaagcaggttaccttaggtgatgatggagttttgagattgcagggtcgagtttgtgtgcctaatgtggatgggcttcgagagttgattttagaggaggcccatagctcccggtactctattcatccgggcgccgcgaagatgtatcaggatttgcggcagcattattggtggcggagaatgaagaaggatatcgttgcatatgtggctcggtgtttgaattgtcagcaggttaagtacgagcatcagaggcctggtggttcatttcagaggattgagcttcccgagtggaagtgggagcggatcactatggatttcgttgttggactcccgcagactcggaggaagttcgatgcagtgtgggtcattgttgataggctgaccaagtcagcgcatttcattcctgtggcagtctcctattcttccgagaggttagctgagatctatatccgggagattgttcgtcttcatggtgtgcccgtgtctatcatttcggaccgaggtacgcagtttacctcatttctggagagcagttcagcgagagttgggcaccggttgagttgagcacaatttcatcctcagacggacgggcagtccgagcggactattcagattttggaggatatgctccgagcttgtgtcattgactttggaggctcgtgggatcagtttttgcctttagcagagtttgcctacaacaacagctaccagtcgagtatccagatggctccttatgaggctttatatggtaggcggtgtcggtctccggttggatggtttgagccgggagaggctcggttgttgggtacggatctggttcaggatgccttggacaaggtcaggattattcaggataggcttcgtacagctcagtccaggcaaaagagttatgccgaccgcaaggttcgtgatttggcattcatggtcggtgagcgggtattgcttcgagtgtcgcctatgaagggcgtgatgagatttgggaagaagggcaagcttagccctaggttcattggcccgtttgagattcttgatcgagtgggagaggtggcttatagacttgcattgccgccgagcttatcagccgtgcatccagtgtttcatgtgtccatgcttcggaaatatcacggcgatccatcccacgtgttagatttcagcactgtccagttggacaaggacttgtcttatgaggaggagccggtagctattctagaccggcaggttcgtcagttgagatcgaagagttttccttctgttcgtgttcagtggagaggtcagcctcctgaggcatcgacctgggagtccgagtccgatatgcggagccgttatccccatcttttcctcaggtacttcagtccgttcgaggacgaacggttgttttagaggtggagaatgtgatgacccaaaaggtcatcacttgttttaaaatgaaattctattcgaggccttaaaaacctcttttagcatcacctcgatttgcgtgcgcagtccgggcgcgtagccggaaagcctaaatgtgaaaatctgtgaaaaatgataaattttgactataaaatgaattaatttgacttcggtcaacgttttgggtaaacggacccggacccgtgatttgacttgggcgtatgcccggaatcgaattccgaggtcccaagcccgagaaatgaatttttaaagaaaattattttctgaaattgtttaaaggtttggaaatgaattttgattagaacatgttggtatcgggcccgtattttggttccggcgcccggtacaggtcttatatatgatttaagataattctgtgaagtttggtaagaaacggaatccgtttgacgtgattcggaccttaaatgcaaatttgatgtttaaagaagttttgagaaatttcattgatcttgaggtttaattcgatgttcatgatgttattttggtgatttgagtacacgaataagtccgtaggatgtttttgaggttgtgtgtatatttggtttggagccccgagggctcgggtgagttttggataggccacggggtgcattttgaacttagaaaaattgcaggatttttgctggtgtgatcaggcctgcaggcttcgcaaatgcgatggctcgcaaatgcgaaccagggcctgccttatctcgcaaatgcgagttgtgctccgcaattccgacctcgcaaatgcgatgcaaatgcgaaaaatccagatttcctaagggttcgcaaatgcgagcttcccttcgcaatttccaagccagcagaggtcggggcaattgcgaaaatttgttcgcaattcccacatctgagacctgcaacttttatacttagacgattttaaacccatttttcatatcctctcaaaacataaacacactaggcgatttttcaaaggcttcttcttctccaaatcaattgtaagtcatttttaactcattttcttcaatcattaacatcttttaacatgatttcaacttaaaatcaatgattttcatgggggaaattgggtgttttgggtagaacctaggtttttcaaaaattggggatttggacctcgatttgaggtccgatttcaaaacaaattatatatttgggttcgtgggggaatgggtaatcgggttttggttcgaacctcgggttttgaccatgtgggcccgggggcgatttttgactttttgggtaaaactttggaaaactcattttcatgcattcaaattgattcatttagcgtttattgatgtaattaagtaacttgtgactagatacgagcgaattggtggtggaatcaaggggtaaagctataattgaattgaattgtgttcgtggcatcgaggtaagtgtttggtctaaccttagcttgagggattaggagttgtgtcctatttgctatttgtttcttgttgagtacgacgtataggcatggtgacgagtatctatacgttggtgtcgagcatgaccgtgagtcttatattgtgattttcatgacttcgttgtgttattcatgccttggtgaaggtttctattattgtgtaaagtttgtggaaagaattgtgacctatgaacattgagtagcgttgtctcaagttgtataacgaattgtgaaagtataagtgataattgaacctccagagcactgactcgagttgtgaagtgaattgtgaagtaaaagtgagaaagagaagagatcattatgttgcccccttgccgggctattgttgagttgtggtttccttgcattgtgttcttaattgacattacgaatgcttaggttgatgattctttgcgttgggtaaggattatggttattctcggggaacaagtttggttatagctgaggtagttagatgttgtaacaagtttgattatagctgaggtagttagatgttttgaatgttgtaacaagtttgattatagctggggtagttagatgttgtaacgagtttggttatagttgtttctcccttgccgggacgtaattgcttatgctgtcggatcccttgccgggatagtgtagaccttgttgatcccttgtcggaactctcgttataattaaaatattttatgtggatcaggttgcacgccgcaacaatgataaatgatatggatcgggttgcatgccgcaacaaaattatatgtggatcgggttgcatgccgcaacaatgatatatgtgtatcgggttgcacgctgcaacaatgataaatgatatggatcgggttgcacgccgcaacaatattatatgtggatcgggttgcacgccacaacaataatatatgtggatcgagttgcacgccgcaacaatgataaatggtatggatcgggttgcacgccgcaacaaagatatatgtgtatcgggttgcacgccgcaacaatgataaatgatatggatcgggttgcatgccgcaacagtgttgttatatattgggatcgggttgcgcgctgcaataattattgatacaagtgtgtttagcgtggatattagtttcttttgttttgctgtgaattttaagctgcccttagactgttacttttgatttactgttaatactggtatacccccgtagcatgtatcccctcccatccttacttgtttatttctgttttattttccaatgtacattatataatacacaggtttatttggtagtctggtcctagcctcatcactacttcgccgaggttaggctaggcacttaccagcacatatggtcggttgtgctgatactacattctgcactcttttgtgcagaccccagtgttgtagacttcagaccgcggtggaattgctgattcttgttcatcaggcgacccaaggtagtcttataggcgtccgcaggccttggcgtctccttccatctactattcctgtttctttcatgcatttccagagacggtattgtatttatttctttcagacctttatttgtagtgttcttagaccgtctgtgaaactatgacacccgttctgggtagtcgagattcaaacagttgtattggattcatgttctgatagcttattgctttttcttccgcttatgttaaattccgctgtttaaatgttattacttnnnnnnnnnnnnnnnnnnnnnnnnnnnnnnnnnnnnnnnnnnnnnnnnnnnnnnnnnnnnnnnnnnnnnnnnnnnnnnnnnnnnnnnnnnnnnnnnnnnnnnnnnnnnnnnnnnnnnnnnnnnnnnnnnnnnnnnnnnnnnnnnnnnnnnnnnnnnnnnnnnnnnnnnnnnnnnnnnnnnnnnnnnnnnnnnnnnnnnnnnnnnnnnnnnnnnnnnnnnnnnnnnnnnnnnnnnnnnnnnnnnnnnnnnnnnnnnnnnnnnnnnnnnnnnnnnnnnnnnnnnnnnnnnnnnnnnnnnnnnnnnnnnnnnnnnnnnnnnnnnnnnnnnnnnnnnnnnnnnnnnnnnnnnnnnnnnnnnnnnnnnnnnnnnnnnnnnnnnnnnnnnnnnnnnnnnnnnnnnnnnnnnnnnnnnnnnnnnnnnnnnnnnnnnnnnnnnnnnnnnnnnnnnnnnnnnnnnnnnnnnnnnnnnnnnnnnnnnnnnnnnnnnnnnnnnnnnnnnnnnnnnnnnnnnnnnnnnnnnnnnnnnnnnnnnnnnnnnnnnnnnnnnnnnnnnnnnnnnnnnnnnnnnnnnnnnnnnnnnnnnnnnnnnnnnnnnnnnnnnnnnnnnnnnnnnnnnnnnnnnnnnnnnnnnnnnnnnnnnnnnnnnnnnnnnnnnnnnnnnnnnnnnnnnnnnnnnnnnnnnnnnnnnnnnnnnnnnnnnnnnnnnnnnnnnnnnnnnnnnnnnnnnnnnnnnnnnnnnnnnnnnnnnnnnnnnnnnnnnnnnnnnnnnnnnnnnnnnnnnnnnnnnnnnnnnnnnnnnnnnnnnnnnnnnnnnnnnnnnnnnnnnnnnnnnnnnnnnnnnnnnnnnnnnnnnnnnnnnnnnnnnnnnnnnnnnnnnnnnnnnnnnnnnnnnnnnnnnnnnnnnnnnnnnnnnnnnnnnnnnnnnnnnnnnnnnnnnnnnnnnnnnnnnnnnnnnnnnnnnnnnnnnnnnnnnnnnnnnnnnnnnnnnnnnnnnnnnnnnnnnnnnnnnnnnnnnnnnnnnnnnnnnnnnnnnnnnnnnnnnnnnnnnnnnnnnnnnnnnnnnnnnnnnnnnnnnnnnnnnnnnnnnnnnnnnnnnnnnnnnnncgcttgcctagctcgtattagtaggcgccatcacgactcccgagggtgggaaatccggatcgtaacaggagttgacctcatgttctccctttcttaattctgagctacgattcattgatatcaactaacaacaaaagattctgaaaattaagttcacacttcaaattttgcggacatacgttatgaataaattaataaagtccacgttcagtgtaccctttttcgtcggagctaggttctattcctgaaatcaataagaaattgatgaaactcacatgcatgattttgccaatgtaatgactaaaacgaacttctgcatccactgtaggaactggatttccacgctctctctcttagatcaatgaaccggccaggcaagagtttcagatatcacatcagggcttcaactttggagttgacaagttgttatgagaaaaatttgcaaatgcattgtcggattctgtgctctctcttgcttctgggtcgcaattgttaaacgaggccacattatattggtccctttaaacacgcggtcattcaattcagacgaaccgaatctgaacaaagaaaaagtatattattactttaaatatatttgtttttattgttatttaaattattgtatcgtattgttaaatttgtcgttacgtaacaacgtaacgtacaattttatgtaacgaccgatttggtgtgacattgttaccttatttttttaatcatattgcccttccttattaatcatttatcatatctttttatatactaataatttattttctattaactttttctttgtaatattgcaagtttattctttatattattggtatatgacatcatgaaaacaacgacaaacgatacaatttatccaaacattgtatcatcaaaacaatatataaaacaatacaatataatacgatacatgcattatgaaacaatttgaacaaccatataatacgttacatgcacgaaataatttgtaacaaccatccaaactagctgtaagggaatggaatctgaaaaaccaaaggaggaagaaaaagaagaatagtagaaagtagaaacaatcacacctaccttcctttgctgcttacaaattgccatttagacaagctcaaacctttttaaatagtggtagattagattttagtatcttgtagttatttccatctaaattcacccaaagtccaagataaatttctttagtgtttttcagttttagaatttaacatataaaatatattttatacataaaatttattcgattcgattcgttatttttcagttttttacaaagctaaaaaaaactatcataattctccgtgaggatataaatttatactgaaaccttattttactttaaaaacctgataatcaactccgttaggttcagtttggtcaaatggtcggttttcaaagttgttttgacacgggtagttgcaattccagtggcctcactactgatgatctcaaatccctaatctcacaagtgagtattactgaattaattatgtaaggaataatttcaaagatgtttcttcgtgtttccctctatcacattatctccctcatggttcataatattatgtttaccttcattattttaattattttgtaataattttctacctatttttcattaatataatatagtttgagaaactctcctttttctaatattaaattttttcaattaattatttctatcaaaatgtcatattttaaaaattcttttaaaataaaatcagaaaacgttcaaaattacacttttactattattgcgatgagtttgcatgccacatggcatccacctcaacgatacgacatgccacgtgaggtaatggtgccatggtggagggtccgaacaccagagggctatatttgcaccaattctattacatcgggggctataatggatcaatagtataacgaagggtataaatgaacattttcaaatagtaaaaggataattttgaaccttttctgaaataaaattgtttaccctaaaaacggataacaattaaatttatatgtggttttaaggatatgcgaattaattcaatacaaatgataaattgcgttagattaaacagatagaaggacgtaataaattgtcaactcacttaagaggaatgattccgagttcggttacagccttaatggaatgcctgccttcgatcccggattcaaaataacgaagcactgatgagcaaaagtaagaactttgaataatggacaaaatgagagtatattgccttggtatgcgtgttacaatgtgtttttaatgaataatcagagcccctttatatagttggggagttttatcctaagcacaattccataaaaggtaaaaatcttccaattaactaatcaccggttctttgccgatacgtgccgagattcacgccgtgatatctagctggtcgtgaatattacgacattttgttgatcgtgttcggttacctggtaatgctctccgaggcctttggggttcgaaccggacatggggtcatggccccgatactcacgagggtaggtgttttacccgaaccccggatcgaacagctccttgcctcgattccagttccttgccttcatgtctctcactctgtttacttcatcggaaattgaggcgtcccgtggttcagtttcatccatacacagatagtccactcgtttctcggagggtaagtttacgaaaacgatgagaaacgacatgagctcttcgattcattctccaatacgtcgtgacagaaacgacaaagaatttgaaatgccccgtcagttgcgtcataatgacttcaaacgcgtgtctgccatcggcaggctatccctggacgcgaaacggcgcaaagcctctataaatactccctccttcgttcattttttacttttgaccaagcttctaccttccaatcttcaagatatcactggctttcttcatactccaacatttttaccttcatttttcaagatttctcggtaaattgaaaacttttatttatgttctgtccaaaccagcatacttgattccttcatctcccaatattccttctcactctcccaaacttttttccatataacaatggtgaagacttctaaaatggctccccaaaaagtcacttcttcttctcaaccgaccaccaaaattgatgaaaccactcctgatgtggtcgacctggagaggtacgctgctgatgtggttaccgatgaaccggctatcgaacctcccttaaaaatgttcattcccgagggttgtttggtcgccgacgactttaaggttgagaatccctcttcggtgtagggtcagcatgaggaggcatcgagatatatatgctcgatcaccgaagatgtcctccttgaagtccgaaatgactgcaactgggcagataaggacatagtggtccccgaccctgaggaggccattactacccatatcgagggatatctaagtatttacacttatcccttcacactaggcccggtggacccgaccattatagacttctgttagaggtacaaagtatgtctcagtcaaatccacccatcgctgaggaggattgcaatcttcattcgattcatcgtgaacaagatcgactcctatcagctcacggttgatcatctactccgcttgtacagttcccgaatcttctgagggggctaataaagctcgtgcaccgaactaacaaagcatcattctcaagcatcgatgaggactggtattgaggctggcatgggagctttgctgggtaaggacctcagacttgatccctaccaaatttaggccattccccgagaggtggaatgcatcacgtaagcacgactttcctttaaatgttgatttatgttcatctcttttttcctcattggtatttgtggtggtacaattgttgctcgagtccccaacactatccctcggctcaagaagtggattgaggatatcatctcacagatgccttactccgagcgctcgtggcgcaaactctcgaagggccgttggtaggctcgttcccatggtaagatttatttcccaaataagttacattaggcttctccttctagcatcacgttctcattttcttgattcctctactttagggcagctcggggctgcatcaggagagaagaagaagaagaagaaaagaaaggctttgggttccccgagctcagagaagaaaaaaccgaagagaagattggcctataagccaaaggatagctccagctctcgagcaccagactcagacttgctctactggctcagggaagagcatgaggaggatgatctttttacggcctacgaaccgacctcccccaaagagcgggcgatagccgaggaggagacaacaaaggcctgtctttctcaggttcgggagaccgatgtagaaacgagggctcagccttctcgagacgctggctctgctccacccagcatcaaagaaatttctgggtcaccttctttcaccgaatctatgttggacaaagctcgagcggagaaggagagatataacgaaggggcctatggtgtggacgacccccttcgttgcctttttgaaggtgtggactcaaccgccctaaaagacttctccggttgggttatttggagctgccgagactatctttggaggtcagcgggctgaactcgagcccaaaattaaacaatcgattccctgccccgagcatggatctcgacaaaaagcagtcaataatcatcactgtcctggtagatgccttggttcttttcgcccccgttggagtagctagataccttcggtgcctagtaaccaataaagagtaggaaaagtgaatgaggtggacacaccgtgcttgttcaacaaagcatagcaggcgctgaaccaggtaatgcatcattaccctctttcatcttcgtattttagtctttgatatctatgatgccttttttttatatttttgcaggctttggtacttcatcataaaaattttctctggtaccagcctgaggttaaccagctcgaggctgaggtcaaggagcttgctgagaagagggacacatataagtttctcagcgagaaacataaggaagcggtcaagagtctttgaacaaagtcggacgcgggtcagaaggagcatgctgacctccgagtcagatgaacgaggccaagtccatggctgaaaggtggaaagaaaaaatggatcgattggcttcggagaaagagactgcccgggagcaactgacatcggtgtaggtccaactccgagtggcaaaagagaaggaaaatgcatgtgctcgacaaatcgatgacctccatgctcaactaggctcagctgctgctaaacgggatacctttaggaaggagctcgaatcagtgaagtctgtgtcagaaataactaggggtgatgctgaagagatggtggcccagtacagggccgatgtcgaggtagcccaggacctccttaaagttactattgagtacgtaagtggttgtcctgaagggagactctcgaggaggtccatgtccagggtttctacctgttagccgagattgaagatgcaaaaaggctcgaggccgaggccaagaagctggctgaccccaaggatggggagggctatgagggctccggtgaccccgaggatggagaagaccctgacaaccctactaacgaggtgggttctggtgaagatcgggcttaggcgccttaaggatttttctttgtttttgtattttgtctattttgttgaggccattatcgtcggcctttgtaaagacttttattggaatgtatataaggcgtttttccctttggtgattttcgagttcgtttcttttggcttcctctttatgattgcaaagatttcaaatgccttagcacggaataaaatgtagtactaaggccttgttcggaggttcaaacaagaaaagacttgttctcaatgtaatttttgtttgaaactcgtgggggctcgatatgactggaagctttacccaaagtgcttatttagatgtttttaaattatagttttaccgagggtagcctttgaaacagtttggaatttttgaaggccttatgttttgattacgggttttggatgtctacgagccatttctagggtggctgtagccttttaagttcagattatgcctaataggatttgtactttcgggcttcgatacctgagccgtccgaacttgccttggacgacagtccccgagtgggtgtgatctctttgaactggatagaggcagcccttgtgctcggtatccttaaggaacaaaatgtaatagtctgaagggacaaaatatgtatctacaaggtggaaactttctttcattcttgtgcggaatatacaagattgtaagtgtgtacaagctttgtattagggcttaagtggtctatgcggacacggttcatttgaccatttggcccttacaataaatcttatcccacaagaccaaaatgttcaagcacatagtttccttccttgctaaaatcagtacccgagggtgatggcccccagtattctaggtcgatcgtcgagaggtcttggatattgttgatgtgaccctcgattctggttcataaccagtttcgattctaagttagcatgatccaatgttgcctcattaaaaacttgccgaaaaacccatttgggacaaaaccgattcaagggaaaaatagtgcaatgcgtgctttcaggcctaatagctgcatcattccttggatattgcctgcaagttttctaattcgtaatatacataaagagaagaatgaatggggtcataccttaacaatagtatcatttttagtgggttacattcaagttgtttggtagtcgctcaccattccctactttgggtttgtatgaacctttactggtaatctctacagttagatatggaccttcccaattcggtcctagattccctttgttcgggtttcggatgttcagtgtcacctttgtcaacaccaagttcccaatattaaaatgtcaaaggttggctatacgactgtaatacctttcgatccatcatttttgggcggccaaccggacaagggcggcctcgtgcctctcgtctaataattccaagttcatgctcatggactcaccatttgactcttcaatcgcatatcgaaactgaaaatagattctcctacctcgaccagtgttagcacttcaacacagtagaccaatgagaatagggtggccccggtactagattttgaggttgtatgatatgcccacagtacttcgggcaaaatttccttccattttccttaggcgtcggtcaatctcttcttaaggttttggagtatggtctttttagtagactctgccttccatttccactagggtgatagggtgttgataggatctttttgatcttatggtcctcaaagaaaattctcaccttactaccaatgaactgctcatcgttgtcgcatacgatcttggccggcactccgaaccggcaaattatgtggtcccaaatacaatcaataacttctttcttcatgactttctcaaatgtccgggcttcaacaaatttagaaaaatagtcagtcataaataatataaattgagtcttgtagggtgcctatggcaggggaccgacgatgtccattccccatttcatgaatggcgaaggtgacaaaactgaatacagcagcttcccaggctggtggatcattggtgcattcctttgacatccatcgtattttcatacgaactcctttgcatctttctccatgttgatccagtagtagccggctctgattatcttaagaacgagcgattcggcacccgaatggttcccgcaggtgccttcgtgaacttcctcaagacatatttggtatttcccggtcctagacatagggcgagtggtccaatgaacgttctccttaatagggtgttatcttcgaacatacaaaacctggccaccttcgtgtacataactcttgattctttagggtccgagggaaacttctcggtcttcaggtaatctatatacatgcttctccaatcccaagttaagcttgtcaagtttatctcgacgtggccctcttccactaccaatttcatgagttgtacaaccgttcccgagctgaattcatcgtcatcaaccaacgatccaaagttagctagagcatcggcctcgctattttgatcccggggtatatgttgtagggtccattccttgaattgatgcagtgttacctgtaatttatccaggtatctttgcattcgttcctctttcacttcgaatgtcctattgacctgattcactaccaggagggaatcacacttagcttcgatcacttcggcccccaagcttttatctagttcgagacctgcaatcattatcctcatactcagccttattattagtcaattttacagttctaatatattgcctaactacattaactattggtggctttgacatgatgccaagtctggacccttttgcgttcgaggaaccatccgtaaagagggtccatatccccgaggaagtccccgagttcaacaacaattcccttacaacctcaagtattaggataggcgtgaagtcggccacgaagtctaccaaaatttgggatttgatggcggtttggggtcgatattcaatatcgtacctgcagatttccatggcccatttggccaatcatcttgagagcttgggtttatgtattatgtttcttaacaggtaggtagttacgacacatatgggatggcattgaaaatacggctttaacttcttggaggcgcttagcaaggtgaacgccaatttttccaagtgaggatacctagtttctgtcacgacccaaaatccactaagggccgtgatggcgccggacaccattgtcaggcaagccaacactaaataactagtaatttctcgttttagatatttctgaattcagttcttttatacatttaaacaataaggaataaattcccgctgaataaataatgatatctttaacaatttcaaaatactgactacttccatagacatcctagaacctggtgtcacaagtgcatgagcatttactagagaatgaaataaaatatagaaactgtccgaaatacaagtagacagaaatgaaaatacagtacaatactctgaaggagactccgctggctacgctagtctcgataactgcaactcacataagtctccgtatcaaccatgccgctatgccactaagccactagccacacataaacatgtgcaacaaaaatgcacatcaagtgtagtatgagtacgaaaacaacgtgtacccaatgagtatcccgtctaatattgaagaagtagagacgagaggtcgacttcgacacttattagtggtccaatagtaatatattataaatgcaagtaatcatggagttattaagaccggtagtaatttcaaataagtcacgaacaggtaaaagttccttttatattaaaaatatccggattcataatctattaatttccaattatctcaagtcagggagagcaaatatcagtatcgataaatctcaaggcaagcaataaaagcatgcgcaaatcctgccgaggacgtatgacccgattcaacaatatttaaactatgcactgccagagcgtcgaatgatgcaaaccatagatgcatctatttaatcaccgaggcgttcgacccgttccgaaattaaacacatacagacagtcaatcaagaaatcaacaaggaacaattatccaaagaaaagcctttaacaattttataaaactgaagtttaatccttttagaaattcatttaccaattcaacaggatttaagcaattcagttgtcaataagattaaaaatattccaagtatagcatgctttttgggtcctagactacctagacttaaacataatagtagctacgcatggactatcatcacctcgtgcgtacatagcccccacaaataggagcacataaccaattatttcaactatggggacaattccctcttacaaggttagaaaggagactcacctcgctccaaagttccataatcggcattccacgcccttccgaagactcaattcgatgcaaaaatgctccacaactagccatttatcatctaagcccattaatatatgctcaagtactcattataatccaatttataacaatttctaaccccgatcgaaaagttgacaaaattgccctcaggcccacatgcccggattccgaaatttctcgaagataaattttacccatggactcacgaactcaaatatatgattttctcttaatttcatacgcaaaattgtggtcaaaatccaagaatattaattttctaggtttcccctaaatccccaagtttctaccaaattttcatgctcaaatccgcacataatcaatgtattnnnnnnnnnnnnnnnnnnnnnnnnnnnnnnnnnnnnnnnnnnnnnnnnnnnnnnnnnnnnnnnnnnnnnnnnnnnnnnnnnnnnnnnnnnnnnnnnnnnnnnnnnnnnnnnnnnnnnnnnnnnnnnnnnnnnnnnnnnnnnnnnnnnnnnnnnnnnnnnnnnnnnnnnnnnnnnnnnnnnnnnnnnnnnnnnnnnnnnnnnnnnnnnnnnnnnnnnnnnnnnnnnnnnnnnnnnnnnnnnnnnnnnnnnnnnnnnnnnnnnnnnnnnnnnnnnnnnnnnnnnnnnnnnnnnnnnnnnnnnnnnnnnnnnnnnnnnnnnnnnnnnnnnnnnnnnnnnnnnnnnnnnnnnnnnnnnnnnnnnnnnnnnnnnnnnnnnnnnnnnnnnnnnnnnnnnnnnnnnnnnnnnnnnnnnnnnnnnnnnnnnnnnnnnnnnnnnnnnnnnnnnnnnnnnnnnnnnnnnnnnnnnnnnnnnnnnnnnnnnnnnnnnnnnnnnnnnnnnnnnnnnnnnnnnnnnnnnnnnnnnnnnnnnnnnnnnnnnnnnnnnnnnnnnnnnnnnnnnnnnnnnnnnnnnnnnnnnnnnnnnnnnnnnnnnnnnnnnnnnnnnnnnnnnnnnnnnnnnnnnnnnnnnnnnnnnnnnnnnnnnnnnnnnnnnnnnnnnnnnnnnnnnnnnnnnnnnnnnnnnnnnnnnnnnnnnnnnnnnnnnnnnnnnnnnnnnnnnnnnnnnnnnnnnnnnnnnnnnnnnnnnnnnnnnnnnnnnnnnnnnnnnnnnnnnnnnnnnnnnnnnnnnnnnnnnnnnnnnnnnnnnnnnnnnnnnnnnnnnnnnnnnnnnnnnnnnnnnnnnnnnnnnnnnnnnnnnnnnnnnnnnnnnnnnnnnnnnnnnnnnnnnnnnnnnnnnnnnnnnnnnnnnnnnnnnnnnnnnnnnnnnnnnnnnnnnnnnnnnnnnnnnnnnnnnnnnnnnnnnnnnnnnnnnnnnnnnnnnnnnnnnnnnnnnnnnnnnnnnnnnnnnnnnnnnnnnnnnnnnnnnnnnnnnnnnnnnnnnnnnnnnnnnnnnnnnnnnnnnnnnnnnnnnnnnnnnnnnnnnnnnnnnnnnnnnnnnnnnnnnnnnnnnnnnnnnnnnnnnnnnnnnnnnnnnnnatgtggttagcttaccttgtcattgatgatgaaaaaccccacttgaagctctccaaaagtgtccacaccatatgaaaatgggggaaaaaaagaccaacccccgattttaaaagaacttactgcctccagcacttctgcacctgcggtcacatgaccgtttctgcggttccacaggtgtggcccctttaccgctcctacggtttctctccaggctccctttttccgcttttgcgccttaacttcgcaggtgcggtcccgcttctgcgacgagatgactgcatctgcggtccttacacttccaacccaaaatcgcatctgcgactctcctgactgcttctgcggctccgcacctgcggccaaaaactcgcaggtgcggttacaccagatatcagctgcctcaatccatcctcaaattccaaaattgatctgttaaccatctggaatccactcgaggcccccgggacccaaaccaatcataccaaccagtcccaaaacacattacagacttgctcgaggcctcaaatcatatcaaacaatgcaaaaatcatgaatctatctccaatccaggcttaatgaactttagaatttcaaacttcaacattcgatgctgaaacctataaaatcacgtccgattgacctcaatctttttgcacacaacaaaaagtccactttcggtcaaacttttcaaaaaccttcaaatttctatctttagccaaatgactccaaaatgacctacggatctctaaattcacttctggtcacgcccccaataccagaatcaccatatagagttattcctggaatcggaatctcaaacgcacattgataaccctgaaatgcacttcaatccaaacttatgagattcttccaaaaatgctaacttccataataggcactaaaacgtacccagtccggacatacgcccaagtccgaaatcatcatacaaacttgctggaaccttcgaatcccgattctgaggttgtttactcaaaaatccaatcttagtccattatttcaccttaaagcttccgaattgagaatattctttccaaattaactctgaacttcccgaaattcaattccgaccatgcgtacaagtcataatacccgaagtgaactgctcatagcctcaaactactgaacgacacgctaaagctcaaaacaaccgatcgggtcgttacattctctcccacttaaacacacgttcgtccttgaacgtgctaagaactgcactgaagttgttctaaatcactgtctaacacctcgagcacctacccacgctaccacaactcagctgggcaccctagctcgatcaatctgaagataccctttttcacttaggcaattaagccttagagcccaattccaacattcgaaattctctgccaggcttgctccaacatatgctcacttaatcaataactacacgcagcaccaaaacatgactgcataccttagttgaattcacaccttgcaccactttactcacaggaccacaataacattctcttatcaatttaatcaaaattccatgactgtgatgctcccattgcacctcatgacatacataggtcttgccctaactcttacaatacccccacgacggaaaagagtgtagaaattcataactaactaccgaatcgacaattcattgggtctatattcctttcaggaaccatcaccctattctgaaccaaataatggtctttgctccttaatatacttcatataatcatattgcaatgatcctaaatccaatgatctcagctcaccccgtccgtactactcaggcaataagccatccaaaacatgatcaaaagtctcatatgctaccacaatgtaccaatatgctaccaattcgaacatgatacataaaggaaatgaactctaaaaaggaaatccaattaccccgcttgcgaatcataatgcgacgcggacacatagctaatacgagttttccttagaaactaggaaacaaaatacataaaaatagatataaggaactgtactcaacatcatactgttgcggcgcgcaacccaatccaaacaacatacccatggtggcgtgccacccgatccacacataaaattcacataagcagttacacattgagctagattgctcattacaacaaaatatcgaatatcggtcacaagcacgctaagtgcataataccatccctagggagatatatagcgctataagctacaaactcaagcacaactggggtgcgatatacgatctgaatctcaagagccattctgctcatataacatcatctctacgcggaacctcaacacataagaaattcactaagccatctcataactcacacagcgcaatatatcattacatgaaatagctgatgacgaggtaataccccgactactctcccataaggagcgcattgctgaaatgaacacatctggcctgatatagagcccatattcacatttaaatccatccacagacctcaagctgattnnnnnnnnnnnnnnnnnnnnnnnnnnnnnnnnnnnnnnnnnnnnnnnnnnnnnnnnnnnnnnnnnnnnnnnnnnnnnnnnnnnnnnnnnnnnnnnnnnnnnnnnnnnnnnnnnnnnnnnnnnnnnnnnnnnnnnnnnnnnnnnnnnnnnnnnnnnnnnnnnnnnnnnnnnnnnnnnnnnnnnnnnnnnnnnnnnnnnnnnnnnnnnnnnnnnnnnnnnnnnnnnnnnnnnnnnnnnnnnnnnnnnnnnnnnnnnnnnnnnnnnnnnnnnnnnnnnnnnnnnnnnnnnnnnnnnnnnnnnnnnnnnnnnnnnnnnnnnnnnnnnnnnnnnnnnnnnnnnnnnnnnnnnnnnnnnnnnnnnnnnnnnnnnnnnnnnnnnnnnnnnnnnnnnnnnnnnnnnnnnnnnnnnnnnnnnnnnnnnnnnnnnnnnnnnnnnnnnnnnnnnnnnnnnnnnnnnnnnnnnnnnnnnnnnnnnnnnnnnnnnnnctgatcgcacttaactaggctaataacctttcaaagatccataatcaccccccttttctcataacacacaagaacaaccatcataatcggagtagtcctccacaatccacaacccaataatcgagtgccctctagtcatcaattctcaatttaacgacatcactacaatcttcatacttggtttaactcttcaatcagtcaagtggttgcatgccacatgttacaacccatattcacgtatgttagctcatggcataaggtattcgacgtaaatccataaagagattatctttaagatgataagaagttaatcttattggtcttaaatgatacaagcgtgtataaggggggttaacaagtattataagttaaacgaatcaaggatattgttagccgtatttttgggtaaacctagaggttcttaatacactcaagaggtagtgttttaaggtgtttgaatcatataatatccgtatcataagtcttgaagtgaaacaagttatgaaacaaaagtcgacaaaagttgccgcaacttaggttcatagttttacttaaacattaggtcaaatgttactaagattttctcccaatttacttagaattatgggatgatatacccaccaaatttaagatctatgagtctagtttccaacgcattaaaccgtttgtcgatacaatctcgaagtacagagatatttgtatttttgtgagactgcgccaaacacctctctatagggcccacttaggcagtttaagacatttggatatatatatatatatatatatatatatatatatatatatatatatatatatatatatatatatatatnnnnnnnnnnnnnnnnnnnnnnnnnnnnnnnnnnnnnnnnnnnnnnnnnnnnnnnnnnnnnnnnnnnnnnnnnnnnnnnnnnnnnnnnnnnnnnnnnngttaattttttcactatattcagaccttagaaccctagaacatcatatcaaggttctctcaagattcaagacccaaataaaggcaaacaacacaaatcaagtgtcgggaatcctgtggcgctagtaagtttcttgttcttcttgttgttgctcatttttgtgttgttccagcnnnnnnnnnnnnnnnnnnnnnnnnnnnnnnnnnnnnnnnnnnnnnnnnnnnnnnnnnnnnnnnnnnnnnnnnnnnnnnnnnnnnnnnnnnnnnnnnnnnnnnnnnnnnnnnnnnnnnnnnnnnnnnnnnnnnnnnnnnnnnnnnnnnnnnnnnnnnnnnnnnnnnnnnnnnnnnnnnnnnnnnnnnnnnnnnnnnnnnnnnnnnnnnnnnnnnnnntcgtgagggaggttgttttaaggggtttatgttctgtaaatggtgttaaccctctagcctgatttataactaaattgttgcagtgtatcgataatggtggcacagttcttagtgtttgctgtagcaaataggcttagatcatcagcaacgaataggtgggaaatattggagcctgtgtggttgatcttaatggggaactagctaccattctgcgcttgagcctcaatgctcctagataggcttttcatacacatgatgaagatgtaggaagacatagggtccccttgtcccatgcccctgctaggatgaaagaaataagtcatacccacattcactaagatatagataaagctagtagatatacatgagaggatcaacttagtcatattattagggaaatcaaaggacaccagggtatctcttataaaagaccattctaatctatcaaaagccttttctagatcaattttaaggatcatgttagcatttttccctttcattttattgaaatggctaatatattttctgcataatgatggaattgtcactagccctcccattggacaggaagttatcttgactagggccaatgttagaggggaggacaagtttgattctactaacaattattttagtgatcaacgtgtacattgtattgcagagtctaattggtctgaaattcttaagaattgtggcattgtcacacttatggataaagcataagtaggttgtgttcacaacatgcttcatttcaaggctgtggaaaacctacttacaaaaattggttactttatctttggtagaagagtgggtgaaggccatcaggcctatggtacttggttagtatgaaagagaacatagcagccttgatctcactgatccttaagggggcattcatattagtcttattacaccccatgttttcgtacatgaaattacgtcgtaagtcagttgatgtatgctcggaaattaggtcatcattaaaagtatataaagcaagttaatcatattactttggaggttaaaaatatttaagatcaataactacaagtaccaataggattagaaggtttagaagctaaacaaatcgaagaaaataagtttcgtcgaaatagcaagtcgggaatattataacccgtactttttgggtcatattagggttattaatatgataaggaggtgatattatgaggtgttttggtcatattatagtcgtgtgttatgttttgaaatcaaacgaattaagaaaaaaggtcgacaaaagttgtcacaagttacgttcataatttacgtaaaatttaggtctaatgttactgatcttttctctcaatgttattggatttatggggttattcatccaaaaaattgaatataaatgaatttattttccaattcattaaaccgttcatcaatacgatatcgaagtggagagatattttgcgagactacgtaagcagctccctttgggacccacaaggtcagttgaggattatcttgatatataaagttatagccttcatctctaaggctcatttcgacccatataagacctaaaaagtatctctatatatcttaaatacatccttagggttttggagcaattccataatccgcaactcaaaatcaagatgcgaacacatcaatgcgattctcacgacatatgtaagactttgccatccccttactccttataactcatgttttggaaagagcttcgtggctaaggaagattttctcctctatattttagttatacaagcataattaagggtatggatcaaagggaacaagttttggaagtgagaatacaagaggtatatagggttttcgtttcatttttgacatgatttgatttaactatgttctagacttttctcttaatcttttaagggttgttcaaggaaaattttagcatatatggtatccttgtataattcaattccatatgtgaattatggaagaaactagtttaggttgaaacttcaaagtacaataaaaacagaaagagtgaattgcccatttgacgtatgtcatccggacatatgtttattccgttcctttgatgtttttacgtatacctaacacccatataatcataatagcttcagttaagtatatataagcttaattattaggtgttgatgcatagattaatcctaaatcatatttatactttcatgtcacaagttagccactatgagtcgacattacgtcacagttctgttcatgttacgtcacaagttagccactatgagtcgacattacgtcagagttggacaaatatttagtttaaagggcatcccgttcctcaagttcttaatattaaccctaggtgatttcaaaccttctaaagtgattctagtgccggaaaatactaatagattgctagtttcacttccttgttgttgtgacagcattatagggatatttcatggacaattaaggtcaaattggagttgttctttctggctaaaggtaaggaacctcttactctacatgtatttaagattatccaagttgcggctaagtcattgaagctagaacttgtgaaatatatatcnnnnnnnnnnnnnnnnnnnnnnnnnnnnnnnnnnnnnnnnnnnnnnnnnnnnnnnnnnnnnnnnnnnnnnnnnnnnnnnnnnnnnnnnnnnnnnnnnnnnnnnnnnnnnnnnnnnnnnnnnnnnnnnnnnnnnnnnnnnnnnnnnnnnnnnnnnnnnnnnnnnnnnnnnnnnnnnnnnnnnnnnnnnnnnnnnnnnnnnnnnnnnnnnnnnnnnnnnnnnnnnnnnnnnnnnnnnnnnnnnnnnnnnnnnnnnnnnnnnnnnnnnnnnnnnnnnnnnnnnnnnnnnnnnnnnnnnnnnnnnnnnnnnnnnnnnnnnnnnnnnnnnnnnnnnnnnnnnnnnnnnnnnnnnnnnnnnnnnnnnnnnnnnnnnnnnnnnnnnnnnnnnnnnnnnnnnnnnnnnnnnnnnnnnnnnnnnnnnnnnnnnnnnnnnnnnnnnnnnnnnnnnnnnnnnnnnnnnnnnnnnnnnnnnnnnnnnnnnnnnnnnnnnnnnnnnnnnnnnnnnnnnnnnnnnnnnnnnnnnnnnnnnnnnnnnnnnnnnnnnnnnnnnnnnnnnnnnnnnnnnnnnnnnnnnnnnnnnnnnnnnnnnnnnnnnnnnnnnnnnnnnnnnnnnnnnnnnnnnnnnnnnnnnnnnnnnnnnnnnnnnnnnnnnnnnnnnnnnnnnnnnnnnnnnnnnnnnnnnnnnnnnnnnnnnnnnnnnnnnnnnnnnnnnnnnnnnnnnnnnnnnnnnnnnnnnnnnnnnnnnnnnnnnnnnnnnnnnnnnnnnnnnnnnnnnnnnnnnnnnnnnnnnnnnnnnnnnnnnnnnnnnnnnnnnnnnnnnnnnnnnnnnnnnnnnnnnnnnnnnnnnnnnnnnnnnnnnnnnnnnnnnnnnnnnnnnnnnnnnnnnnnnnnnnnnnnnnnnnnnnnnnnnnnnnnnnnnnnnnnnnnnnnnnnnnnnnnnnnnnnnnnnnnnnnnnnnnnnnnnnnnnnnnnnnnnnnnnnnnnnnnnnnnnnnnnnnnnnnnnnnnnnnnnnnnnnnnnnnnnnnnnnnnnnnnnnnnnnnnnnnnnnnnnnnnnnnnnnnnnnnnnnnnnnnnnnnnnnnnnnnnnnnnnnnnnnnnnnnnnnnnnnnnnnnnnnnnnnnnnnnnnnnnnnnnnnnnnnnnnnnnnnnnnnnnnnnnnnnnnnnnnnnnnnnnnnnnnnnnnnnnnnnnnnnnnnnnnnnnnnnnnnnnnnnnnnnnnnnnnnnnnnnnnnnnnnnnnnnnnnnnnnnnnnnnnngactattttgggaggttcaatatgattaacattgatgttgttttggctatttggttattttttcacttgtaggaagtcatataaataggggaggtgctgttcgcttcctcgtaaaataggttgtgttcgatacatagtagttacgacgcctaaatgataacgatagtgtcatttcttattgtaggctaaggagccgtgaaattgcatatcttgaggttgggaagaatatacaaggtatgtgaggctatccctttccttcttttgcacgaccccgattgtacataatgtaatgaacaagattctaaagatactctactcttagaagctagcagtacttacattgtttccctttttatggagcgattgatgttgatgttgcatctcttattcttatgttatcaatgttgttggtatttccttattcttataagattaatgataaagcgttagtcctaataagtgtacagaggataccgaccttaatcactccggaaggttcaaaatattattccaatgagtccagcatgcattgtatatatgtatctattttactctaccgagccgcgctatagacggccgggtacaacacctattgtgcaaccactaatcaattgggttttaccaaactacatgtggtcgggtacgattctaccaagccttatgatggccaggtacgattttaccgagtcttttttgaggtcgggtatgatatgatgatgatgcccacagaggcgtgtgttttaaaagtttatgtatatatatttttgtatcatgcatttcatgtcagtagcctacagaggtacccagatattacaggttgtatattctctatccttattcacattactatatatacttatgtttttcttccttgcatactcagtactttattcgtactgacgtcttttttatttgtggacgctgcatcttgtgctgcaggtcctgatagacgggtagatgcagctcccccaccatagtaggctgcctagttcagcggttattgacgagatcccttctccggacttgtcgtggtcttggtatgcatttttgttatagacattatgggtatgtcagggccctgttccggctatgtttcaacacttatgttcctttagaggcttatagataggtgttggctcatgtatagtttggtatgccttgtcggctgaatttttgttgtatagcctttcatggtagcgtggtagctcgtaccttatatataatttcttgattatctggtcatcccatgttatgtatgttcatgccatcatattttattgttggttgtccatgatccatgtctaccatttatattgatctcgtcatccctaaaagataataaagaaggttagataaaatgtacgttggtgcttggcaagtatggctgggtgctagtcatggcactccagtttgggtcatgacaaacttggtatcagagcaagtgtgtcctaagggttgtctatgagacgtgtctagtagagtcttgattatggatgtgtagcgcgccacatttataatcaggagggtacatgacatctagggttgttaccttcttcctgaatnnnnnnnnnnnnnnnnnnnnnnnnnnnnnnnnnnnnnnnnnnnnnnnnnnnnnnnnnnnnnnnnnnnnnnnnnnnnnnnnnnnnnnnnnnnnnnnnnnnnnnnnnnnnctaagtgttcgtctctaatattcaccttattctctttcagtaatgcctttgactaggaagcaaatgattagtagacggcttgatatagaagcgagagagggtaccagtcaggtgccccaagctagatcaggacaaggtgaggctcagagtgagatgccctctcatacctcatctactctatctcctccagaggatattaggaggcaccgagcacctccagttcctccttctggaactacagaccaagatatgtggagtgctttgcagttgttgactagcttggtagctgctcaggcttagacacagaatacaggtgatgttgataaactagttagtacgagagttcgtgattttattaatttagaccctccagtgtttaccggatcagaccccaaggaggacccgtagacttttattaactaggttcatcgtacactgtggggttatgcatgctagtgatatagaggtagtagagttggcttattatcggttacgggatttaacggttttctggtatgatagttgggagagatccaggggtccgaacgctccttcggctgtgtggaaggaattttttgaggcctttcttcgtcactacttgatagttgagatacgatgagctagagctgataagttcttgaaccttaggcaaggtaatatgagtgtgcgatagtacagtatgcagtttaattctttatcaaagaatactccccatatggtggccaagatgagtgatcgggtgcatatgtttgtgaacgggttgggaccatatctgataaatgagtgcacaacagcctccttggtggagggcatggatatttcccatattcaggcttatgcccagaccctagaggatcgtaagcgccannnnnnnnnnnnnnnnnnnnnnnnnnnnnnnnnnnnnnnnnnnnnnnnnnnnnnnnnnacaaaaggtagatagggagaaggataggggccaacataagagggcgagatttgtagggtattctgatgacttcggaggcagtgtcagatcccaatcttcgaggagttcggtgccatctgtagctagtgctcctctacagtttcagaggcctcgatatgatcgatttacctattcaggtccaggtcaaagttcgcgggcattaggctcgcaatataacagagatactagtcagacgagacccccaacatcacgttgtgatcagtgtggtaaggcccactttggactgtgccatcgaggttctgatgcgtgctattcttgcagacagcctagccatataatgcgggattgtcctaatataggaggtggtggtatggctcagccgactagatctgtgtctggttcttcgtcatcaatttgatctccagcatgaggttttcagcagtcgacaggtcgtggtagaggtagaggtgcagtgccgcattcgagtagtgctcaaaatcaaacctatgctctagtaggtcgacaggatctcgagtcgtctctagatgttgttacaggtatattgtctgtattttcttatgatgtatatgcgctgattgatctgggatccacattatcatttgttacaccctttgtggctaataagtttggcattaaacctgaattgataagtaaaccacttgcggtatctactccgataggagattctgtgatcactaggagggtatataaaggttgcacagtgatgatttgtagtcgtcaaacctcagcaaatttatttgagttagaaatggttgatttcgatgtgataatggggatggactgtttggcctcatgctatgcaaatattgactgtcgtacgaagatggttagttttcaatttcctggtgaacccgtcattgaatggaaggggaacattgctacaccgaaaggtaggtttatttcctatcttaaggcaaggaaaatgatctcaaaaggttacatttatcatatcgtttgcgttagggatgcggaggcgaagccgcctactctacaatcaatccccgtggtcaatgaatttccaaatgttttcccagatgaactcccaggccgtcctcttgaaagggagattgagtttagcattgatgtgttgcctgacactcaaccgatctatatcctccatatagaatggcctcggtagagttgcaagagttgaaggcgcagttgaaggacttgctagataagggcttcattaggcctaacacttcaccttggggtgcgccagttttgtttgtgcggaagaaagatgagtcgttaaggatgtgtatcgattatcgacagttgaataagtttactataaagaacaagtatccacttccaaggattgacgacctttttgaccaactccagggtgccaagtatttctccaagattgacttacgttcagggtatcatcaggtgaggattaaggagaaggatgttccaaagacggccttccggacaagatattggcactttgagttcttggtgatgtcgttcgggctaacaaataccccagctgcttttatggatctcatgaatactgtattcaggccctatcttgatgtgtttttgattgtagtcatttatgacattctagtgtattctcgttcggaggcggaacatgcgggccacttgcggatagtattacagacacttcaagattgtaagttatatgctaagctctccaaatgtgaattctggctgaactcagaagcattacttggccgtatgatatctgacgagggtattagtgtcgacactcagaagatcgatgcagtaaagaattggccgagaccgacaacaccatcaaaagtccgcagcttcctggggctagcaggatattataggcggtttgtagaagggtttttctttatatcagcaccattgactaagttaacacagaaaactaccaagttccagtggtctgacacttatgaacgtagttttcaggagctaaagaatcgattaacatccacaccagtgctcactctccctgaaggaacagaaggttatgtggtatattgtgatacctcaggtataggtgtggggtgtgtattgatgcagcgtgggaaggtgattgcttatgcatcaagacaattgaagaagcaagaaaagaattatccaacccatgatttggaattggttgcagtaatatatgatttgaagatatggcggcactacttatacgtcgtccatgttgacatctacacagatcacaagagtttacaatacatcttcaagcagaaagagttgaatttgaggcagcgtaggtggcttgaattactgaaagactacgacgtcgagatattgtatcatcctggtaaagccaatgttatggcagacgctcttagctgtaagctaatgggaagcttagtacacattgaggcaggtagatgggggttgactaaagagcttcatcagctagccaatatgagaatcagattgttagactctgatgatggaggtgttactgtacataatacatcagaatcatctttgttagccgaggtaaaagtacgacaatatgaagatcctatcttagtacgattgaaagagagcattcagtagtgtaaaattacggcttttgagatcggaggagatggggcactaagataccagggccgattatgtgtgcctaatgtggcagggttgtgagataagtttatgaatgagattcatcaatcccgatattccatccatcctggctcgacaaaaatgtatcatgatgtcaaggagcagtattggtgggataacatgaagaagtctattgcagaatttgtagcccagtgtccataattgtcaacaagtaaagatcgaacatcagaaacccggtggattccttcagaatatagagattccgacctggaaatgggaggtgattaatatggactttattattggattaccttgctcttatcataagtttgactccattagggtgatagttgatcgacttacaaaatgtgcccattttttgccagttaagacaacttacttggctgaagattatacgaagttgtatatcaaggagattgttaggcttcatggtgtgccggtatctattatattaaaccgaggagctcaatttatggctaacttttggaggtctttttagaagggtttaggcacacaagtaaatctcagcactgcatttcatccacagactgacggacaggctgaacgtattattcatacacttgaaaatatgctacgagcatgtgttctagatttcaaggggaatcaggatgaccatcttccactcatagaattcgcctacaataatagctaccattccaatattaaaatggccccatacgaggcactatacgggaggagatgtagatcaccagttggatggctcgaagtcggtgaaacagaattatatgggccaaatttgattcaccaaggcattgagaaggtgaaagtgatacaggagcgattgaggacggcataaagcaggcaaaagtcttattccaatgactgacgtcgtgatctggagtttgagtttagtgattgggttttcctgagtatctcaccgatgaagggtgttatgtgtttcgggaagaaaggtaagctgattctgcggtatatcgggatgtataaaattcttcaacaaattggacaggttgcttatgagttagaattgccatccgaattggaatttgtccacccggtattccatgtatctatgttgaggaaatgtattggagacccttctcgagtcatcccaatcaaagatgtacaagttatagaggatctatcatatgaagaagtgccagtggcaatattagatcgacaagtccgcaagctgagaacaaaatatgtagcatctgtcaaagtattatggaggaacaagaatatggaagaaatgacatgggaagcagaagagaagatgaagtctaaatactcttacctattccacaatgaagataacaaggatgttggtggaacgcaggatacattggaaggtgaaactgctctatgaggtaagcaataacttgagaatactcttccttaatacaaaatggtgatatgtagataatgtaaatatccataatgctttgtgtagccttgtgaggacatatgttgggcttaactgcttgcaagttttgctagtgaccattttataagggaaaattgaccggaaatttccattggaatccacgatgatttggactccccataaacctttacattcgaggacgaatgtccctaaggggggagggtgttacaatctatattcacgtatgttagctcattccataatggactcgacgtaaatccatgaagagattatctttaagatgataagaagttaatcctattggtcttaaatgatacaaagatgtataagggtggttaacaaatactagaagttaaatgaatcaaggatgttgtcagccgtatttttgggtaaacctagaggtgattaataaacttaagaggtagtgttttaaggtatttgaatcatataatatccgtatcataagtcttgaagtgaaacgagttatgaaacaaaagtcgacaaacgttgtcgcaacttaggttcataggtttacttaaacattaggtcaaatgttactaagcttgtctcccaatttacttagaattatggggtgatatacccaccaaattgaatatctatgagtctagtttccaactcattaaaccgttcattaatacaatctcggagtagagagatatttgctttttcgcgagactgcgccaaatacctctctatggggctcacttaggcggtttaagacatttggatatatatatatatatatatatgatacctccaaccctttttaagtcaatttttttcactatattcagaccttataaccctagaaacaccatatcaaggttctctcaagattgaatacccaaacaaagggcaaacaacacaaatcaagtgtcgggaatcccgtgtcgctagtaagtttcttgttcttcttattgttgctcatttttgtgttgttctagatcatgtgggaggtttatttaaggggtttatgttttttaaatacttactcaagttcttaatattaaccctaggtgatttcaagccttctaaagtgactctagtgtcgaaaaacactaattgattcctagtttcgcttctttgttattgtggcagtattggagggatattaaggtcaaattggagtttttctttctgtataaaggtaaagaacctcttactctgcatgtatttaagattatccaagtttcggctaagtcattgaagctagaacttgtgaaatatatatcgaaaagattggtagtaatgttatcggttggtggactattttgggaggttcaatataattaacattgatgttttttgtctgtttggtgattgttttcacttgtgggaagtcatataaatagggtaggtgttgttcgtttcctcataaaataggttgtgttcgatacatagtagttacgatgcctaaacgataacgatagtgtcatttctcttattgtagactaagaagccgtaaaattgcatagcttgaggttgggaagaatatacaaggtatgcgaggctatccctttccttcttttgcacgaccccgattgtacataatgtaatgaatgagcttccaaagatactctactcttagaagctagcagtacttacattgtttcccttcttatggagcgattgatgttgatnnnnnnnnnnnnnnnnnnnnnnnnnnnnnnnnnnnnnnnnnnnnnnnnnnnnnnnnnnnnnnnnnnnnnnnnnnnnnnnnnnnnnnnnnnnnnnnnnnnnnnnnnnnnnnnnnnnnnnnnnnnnnnnnnnnnnnnnnnnnnnnnnnnnnnnnnnnnnnnnnnnnnnnnnnnnnnnnnnnnnnnnnnnnnnnnnnnnnnnnnnnnnnnnnnnnnnnnnnnnnnnnnnnnnnnnnnnnnnnnnnnnnnnnnnnnnnnnnnnnnnnnnnnnnnnnnnnnnnnnnnnnnnnnnnnnnnnnnnnnnnnnnnnnnnnnnnnnnnnnnnnnnnnnnnnnnnnnnnnnnnnnnnnnnnnnnnnnnnnnnnnnnnnnnnnnnnnnnnnnnnnnnnnnnnnnnnnnnnnnnnnnnnnnnnnnnnnnnnnnnnnnnnnnnnnnnnnnnnnnnnnnnnnnnnnnnnnnnnnnnnnnnnnnnnnnnnnnnnnnnnnnnnnnnnnnnnnnnnnnnnnnnnnnnnnnnnnnnnnnnnnnnnnnnnnnnnnnnnnnnnnnnnnnnnnnnnnnnnnnnnnnnnnnnnnnnnnnnnnnnnnnnnnnnnnnnnnnnnnnnnnnnnnnnnnnnnnnnnnnnnnnnnnnnnnnnnnnnnnnnnnnnnnnnnnnnnnnnnnnnnnnnnnnnnnnnnnnnnnnnnnnnnnnnnnnnnnnnnnnnnnnnnnnnnnnnnnnnnnnnnnnnnnnnnnnnnnnnnnnnnnnnnnnnnnnnnnnnnnnnnnnnnnnnnnnnnnnnnnnnnnnnnnnnnnnnnnnnnnnnnnnnnnnnnnnnnnnnnnnnnnnnnnnnnnnnnnnnnnnnnnnnnnnnnnnnnnnnnnnnnnnnnnnnnnnnnnnnnnnnnnnnnnnnnnnnnnnnnnnnnnnnnnnnnnnnnnnnnnnnnnnnnnnnnnnnnnnnnnnnnnnnnnnnnnnnnnnnnnnnnnnnnnnnnnnnnnnnnnnnnnnnnnnnnnnnnnnnnnnnnnnnnnnnnnnnnnnnnnnnnnnnnnnnnnnnnnnnnnnnnnnnnnnnnnnnnnnnnnnnnnnnnnnnnnnnnnnnnnnnnnnnnnnnnnnnnnnnnnnnnnnnnnnnnnnnnnnnnnnnnnnnnnnnnnnnnnnnnnnnnnnnnnnnnnnnnnnnnnnnnnnnnnnnnnnnnnnnnnnnnnnnnnnnnnnnnnnnnnnnnnnnnnnnnnnnnnnnnnnnnnnnnnnnnnnnnnnntttctcttattcttatgttatcaatgttgttggtatttcctaattcttataagattcatgataaagagttagtcctaataagtatacagaggatatcgaccttaatcactttggaaggttcaaaatattattccaatgagtccagcatgcattgtatatatctatctattttactctaccgagcctcactatagatgtccaggtacgacacctattgcgtaaccaatgatcagttggggtttcccgagctccacgtggtcgggtacgattctaccgagccttatgatggtcgggtacgattttaccgagtcctttctgaggccgggtatgatatgatgatgatgtccacagaggcgtgtattttaaaagtttatgcatatatatgtttgtatcatgcattttatgtcagtagcccacagaggtacccagatgttacatgttgtatattctctatccttattcacattactattcatagttacgcttttctgccttgcatactcagtactttattcgtactgacgtcctttttatttgcggacactgcatatcgtgctgtaagttctgatagatgggtagacgcagctcccccaccacagtaggctgcccagttcagcggttattggtgatatcccttctccggacttgctgtggtcttggtatgcatttttgttatacacattatgggtatgtcggggccattttctggctatgttgcaacacttatgttcttttagaggctcataaacaggtgtggactcatgtatagtttggtatgccttgtcggctgaacttttgttgtatagtctttcatggtagagcagtagctcgtaccttatatatagtttctttattttctggtcatcccatgttatgtatgtccatgtcatcctattttattgttggttgtccatgatccatgtctaccatttatattgattgcgccagccctaaaaaataataaagaaggttagataaaatgtacgttgttgctcggcaagtatggtcgggtgctagtcatggccctccagtttgggtcatgacaccacacttatacaactttcccgtggggcacactcctacgacctttcgtttcagataacaggtctgtacatccaaaccaccagccgcactaacgctgaaaagcgatcaagaaccctcaaccaggatgcaaagcctttttcacaaaataccgacctcaagtgacactgaggacaataccaacttatttttaaacatccgaactcctttcctgctcatccgagctcgtgacatctttgtcaacaccgaatcgcaaccttgatcctcacttctaattccataccacttagtgcacccaacatgcccatatacgatagaacatgatttccatcataaccccggaaccactaatagatcaaaacttcatcatataaaaacttttcacttaactcacttcaggaggaccatatcaacacacaagtaaattctcataaccgtagaatatgcaattctctaagtagtagcctaagccaccatatccctttcgggatccgcctacacatacaggccataacaatagaatacttctgaataatatcaattacggcggccgacaagctcaccacgtaccgctaaaatccacttgcataacttgatcacgctaaaagaactgatcactaccaccaatctgccaattcaactatggctaaccaatctatcttcttccaatttatccttgattgccttagaaataataataaccccatctaacacataacacgctccattcgcactcatcccgagtgaccttgaatcacgagaccatgttgtctcaaatcccacaaactgtttcatacctcccaaatgctacactgcaagtcaaaacatcctagaagattctaggactcttcttataagctgctacaaagcttgatttttaaccgtacctataggctcgaaatcattacgcaccacactttacccctttgaatccactagtaccgttgttgagagccacccgctctgacttggccctgaatgttatcaattccatgaatcttctagtatatgaataccttctcgacgaagcacccggcaaaatcacttcccttggaacccgtatctatacaaggcgtaaatcctgaatcctctcatagaatcatcatccacagtcgcacgaccgatctctttgttgtataacccatagaattctttgcagaagcttcgccaaccatgtaaccgctggtctgctcactggagataacccacctgggaaatttacgtgccaacatattccaacgctgctgcacggggtacaatcattatgacatcaataactcatcctgagtccgaactcactctctagctgcacaggtccattcacccctcgtggaaatcaattaaaggtgtggcaacatccttccaatccaaagttatgttgtatccttcttcatttcaagcagctcctttccattgtacgaaatcttctaccgcataatagctcatacttcagcttaaatccatagaccccaatcacccatcactaaaattcccaaatcattccaaactttccttaaggtgcgtagtcatcctaccacaaaacccacatgcaactccgccactcttccgctttggcggaactcactcctttaatcaactacttgaccttcacttcttatacctggccttctagaaattttaaccaccacctgacactccccatatgtctttcctcatcctttgctgcttagttgttgccttaactaaaatccatctttgtagcacttgaacccacaaatcgctactaactttaaacctttccgaagatcatctttctcgagccgtcaacatttgaaacaccgattcaatcctgaaccaccacaccccgcgatctttgacagccgattttccagtacttttgtataataacatgccccaaaggtgaatcgtagaagatcataacaccgatgaacttaacacatccaatcgaggacgacaacactacatcgtagatgaaaattccaccacgctcgaaaataccatgtctcattgctccatcaccccaaatccggacattcataggccaattgcttttcctccaccagaaatgaaatatcagatctctgaattatgcactgagtggacttcctttcaaatcattcaccgccccaacacataggcaagtatcctatcatcaagtcaatactgtgtgataactaatcgtgagcatcatagcaacttgtgcatagcctccaagctcttagaggcacaactactgatccaaaacgatagaaaaaaaaatccttccacaaggcgatgacaatagcccaaccaactacacagggagaacatcccgcaccatatctgtagtaccattacaatccttcaattctcgatttataacaagtggttcgcgtcgtgtaagattgaataggaaggaaataaaagcataagtctcaaggaattaaaccacacaatgaggaatcaagaagggaagtgctcctaacagccctgcagcctctcgaagataagtacagacgtcttcgtaccgatccgtaaaactctactagactcgctcatgactcatgacacctaaggaaacctagtgctctgataccatgttgtcacgatccaaaatccactaagggtcgtgatggcaccggacaccattgttaggaaagccaacactaaataactagtactatcttgttttagatatttctaaattcacttattttatacatttaaacaataagaaataaattcccactgaataaataatgatatctttaaaaatttcaaaatactgactacttccatagacatcccaaaacccggtatcacaagtacatgagtatttactagggaatgaaataaaatacaaaaactattcgaaatacaagtggacagaaatgaaaatacagtacaatactctgaagaaaactctgctggctacggtcatctcgataactgtaactcacctaagtctctgtatcaaccatgccgctatgccactaagccactagccacacataaacctatgtaacaaaaatgcacatataagtacgaaaataatgtgtacccaatgagtattccgtctaatctcaaagaagtagagacgagaggtcgactttgacacttactagtggtccaatagtaatatattataaatgcgagtaatcaagaagttattaagtgtgatgacccaagaggtcatcacttgtttttaaaatgaattctgcattctgaggctttaaaaacctcttttagcatcacctcgatttgtgnnnnnnnnnnnnnnnnnnnnnnnnnnnnnnnnnnnnnnnnnnnnnnnnnnnnnnnnnnnnnnnnnnnnnnnnnnnnnnnnnnnnnnnnnnnnnnnnnnnnnnnnnnnnnnnnnnnnnnnnnnnnnnnnnnnnnnnnnnnnnnnnnnnnnnnnnnnnnnnnnnnnnnnnnnnnnnnnnnnnnnnnnnnnnnnnnnnnnnnnnnnnnnnnnnnnnnnnnnnnnnnnnnnnnnnnnnnnnnnnnnnnnnnnnnnnnnnnnnnnnnnnnnnnnnnnnnnnnnnnnnnnnnnnnnnnnnnnnnnnnnnnnnnnnnnnnnnnnnnnnnnnnnnnnnnnnnnnnnnnnnntgcacaatccgggcgcgtagccggaaagcctatatgtgaaaatctgtgaaaaaatgataaattttgactataaaatgaattaatttgacttcggtcaatactttgggtaaacggacccggacccatgatttggcggtcccggtgggtccataggaaaatataggacttgggcgtatgcccggaatcgaattctgaggtcccaaacccgagaaatgaatttatgaaagaaattgttttcttaaaaatataaaggtttttgaaagtgaaatgttatgtgaaacctgtggtattgggcccataatatggttcttccggagtccagtataggttcaatctgatttatatgtgttttcggtaaagtttggtaagaaacggaatccatttgacgtgattcggaccttaaatgcaaaatttgatgtttaaagaagttttgagaaatttcattgatcttgaggtttaattcgatgttcatgatgttattttggtgatttaattacacaaataagtctgtaggatgttttttaggttgggtgtatatttggtttgaagccccgagggctcgggtgagctttggataggccacggggtgcattttgaacttagaaaattgcaggattttgttggtatgatcaggcctgcaggcttcgcatttaacaagtccaagcctgcccttcctcgcaaatgtgagatgttcctcgcaatgccgaccttgaaaatgcgagggtgccttcgcaaatgcgatgtatgccggaaatgcttgaagtcgcaaatgcgacatttctgatcgcaaatgcgaaaagcccaaatttcctgaagggttcacaaatgcgagccttgtttcgcaattcccaagccagcagaggtcggggttcgtaattgcgaacccctgttcgcaattcccacatctgagacctgcaacttttatacttagacgaattttaacccatttttcatatcctctcaaaacataaacacactagggcgatttttcaaaggcttcttcttctccaaatcaattgtaagtcgtttttaactagtttccttcaattattaacatcttttaacatgatttcaacttaaaattaataattttcatggggaaaattgggtgttttgggtagaacctaggtttttcaaaaattggggatttggacctcgatttgaggtccaatttcaaaannnnnnnnnnnnnnnnnnnnnnnnnnnnnnnnnnnnnnnnnnnnnnnnnnnnnnnnnnnnnnngaataattgggttttggtttgaacctcggattttgaccatgtgggcccggggctatttttgactttttgtgtaaaactttggaaaacacattttcatgcattggggttgattcatttagagtttattgatgcaattaagtaacttgtggctagattcgagcggattgatggtggaatcaaggggtaaagctataattgaaacgtgaattgtgttcgtggcatcgaggtaagtgtttggtctaaccttagcttgtggtattaggagttgtgtcttatttgctgcgagttaattgtggagtatgacgtatatgtgtggtgacgagtatctatacgtcggtgtcaagcatgcccgtgagtcttgtattgtaattgttatgactccgttgggaattatttcacttcacatgttattgaaatattattgtccccttgccgggatgttgttatattgccctggttcccttgccgggatgtcgttatattgctcttgttcccttgtcgggacgttgttatattgcccttgttcccttgtcgggatgttgttatattgctcttgtttccttgccgggattctttatgattgctattgatttgtaatttggagcgggtggtactcctgtcacgagataaataaaatgggagcgggtggcatgcctaccacaaggtaaatgaaatgtgagcgggtggcacgccttccacgagatacatgaaatgggagcgggtgtcgtgcctaccacgagatacatgaaatgggagctggtggcgtgcctgccacgagatacatgaaatgggagctggtggcgtgcctgccacgagatacatgaaatgggagcgggtggcatgcctgccacgagatacatgaaatgggagcgggttgcacgccagcaacgagatacgtgaaatgggtgtgggttgcacgcctgcaacaagatgtgaaatgaaagtgaattctgcctttgtttcccttatccttgttagtagttggattttggttcctttannnnnnnnnnnnnnnnnnnnnnnnnnnnnnnnnnnnnnnnnnnnnnnnnnnnnnnnnnnnnnnnnnnnnnnnnnnnnnnnnnnnnnnnnnnnnnnnnnnnnnnnnnnnnnnnnnnnnnnnnnnnnnnnnnnnnnnnnntaccatctttacttgcttatttctgttttactttccgttgtatattttataattgcacaggtttaattggtagtccggtcctagcctcatcactactttgccgaggttaggctgggcacttaccagcacatggggtcggttgtgctgatactacactttgcactatgtgcagatcccggagcagctcttggactgtagtttggaggctaccttcagtccacgcaaagatccaaggtagacttgcaggcgttcgcaggcactagcgtctcctctatcttttatttcctgtttcatctttctgcttcagaaacagtgtgtcttttatttttagaacttgtatttagcagtcttagaccgtctgtggtactgtgacaccaggttttgggtgattaaggcttgagcagttgtaatagatacaaatttcagatattttatcattttcttccgcttaaatttaaattttcgctgtttatacattatcgcttcatgtttgttaaaaagaaataaatggataatgaagtaattaatttaaaggattggctttcctagcttacattagtaggctccatcacgactcccgagggtggaaaattcgggttgtaacattaagaccagccgtaatttctaataagtcacaaacaggtaaaagttccttttatattaaaaatcttcggattcataatctattaatttccaattatctcaagctagggagagaaaatatcaatatcgataaatctcaaggcaagcaatacaagcatgtgcaaatcctgccgaggacgtacgacccgatctaacaatatttaaactgtgcactgctagagggtcgaatggcgtgaaccatagatgcatctatttaatctaccaaggagttcggcccgttccgaaattaaacacatacagacagtcaatcaagaagtcaacagggaacaattatccaaagaaaaatcaattctcttttaacaattctataaaaatgaagtttaatccttttagaaattcatttaccaattcaataggatttaagcaattcagctgtcaataagattacaaatattccaagtagagcatgctttttgggtcctagactacccggacttaaacataatagtagctacgcacggactctcgtcacctcgtgcatacatagaccccacaaataggagcacataaccaattattttacctatagggacaattccctcttacaaggttagaaaggagacttaccttgctccgaagttccataaccggcgttccacgcccttccgaagactcaattcgatgcaaaaattctccaaaactagccattaatcatgtaaacccattaatatatgttcaagtactcattataatccaatttataacaattcctaaccccgatcgaaaagttgannnnnnnnnnnnnnnnnnnnnnnnnnnnnnnnnnnnnnnnnnnnnnnnnnnnnnnnnnnnnnnnnnnnnnnnnnnnattgtcctcgagcccacgtgcccggattccgaaatttctcgaaaataaagtttactcatgaactcacgaactcaaatatatgattttctcttaatttcatacgcaaaatcgtggtcaaaatccaagaatattaattttctaggtttcccctaaatccccaagtttctaccaaattttcatgctcaaatccgcacataatcaatgtatttaactcaagataggtggggttagcttaccttgtcgttgatgatgaaaaaccccacttgaagctctccaaaagcgtccacgccatatgaaaatggagggaaaatgaccaatccccgattttaaaagaacttactgcctccagcacttccgcacctgcggtcacatgaccgcttcagcggttccgcaggtgcggcccctttaccgctcctacggtttctctccaggctcccctttccacttatgcgcctcaactctcgcaggtgcggtcccacttttgcggcaagatgactgcatatgtggtccttacacttccagcccaaaatcgcatatacggctctcctggccgcttctgcggctccgcacctatggccaaaacctcgcaggtgcggttacaccagatatcagctgcctcaatccttcctcaaattccaaaatttatttgttaacaatccgaaatccacctgaggcccctgggacctaaaccaatcataccaaccagtcccaaaacacattacaaatttgctcgaggcctcaaatcgtatcaaacaacgctaaaatcatgaatcaatctccaatccaagcttaatgaactttagaatttcaaacttcaacattcgatgccgaaacctatcaaatcacatctgattgacctcaaattttgcacacaagtcatatttgacattatggacctactccaacttttggaattggattccgaccccgatatcaaaaagtccacttccagtcaaacttctcaaaaaccttcaaatttctatttttagccaaatgactccaaaatgacctacggacctccgaattcacttccgatcgcgctcccaataccagaatcaccattcggagctattcccagactcggaatctcaaacggacattgataaccctaaaatgcacttcaatccaaacttatgagattcttccaaaaatgctaannnnnnnnnnnnnnnnnnnnnnnnnnnnnnnnnnnnnnnnnnnnnnnnnnnnnnnnnnnnnnnnnnnnnnnnnnnnnnnnnnnnnnnnnnnnnnnnnnnnnnnnnnnnnnnnnnnnnnnnnnnnnnnnnnnnnnnnnnnnnnnnnnnnnnnnnnnnnnnnnnnnnnnnnnnnnnnnnnnnnnnnnnnnnnnnnnnnnnnnnnnnnnnnnnnnnnnnnnnnnnnnnnnnnnnnnnnnnnnnnnnnnnnnnnnnnnnnnnnnnnnnnnnnnnnnnnnnnnnnnnnnnnnnnnnnnnnnnnnnnnnnnnnnnnnnnnnnnnnnnnnnnnnnnnnnnnnnnnnnnnnnnnnnnnnnnnnnnnnnnnnnnnnnnnnnnnnnnnnnnnnnnnnnnnnnnnnnnnnnnnnnnnnnnnnnnnnnnnnnnnnnnnnnnnnnnnnnnnnnnnnnnnnnnnnnnnnnnnnnnnnnnnnnnnnnnnnnnnnnnnnnnnnnnnnnnnnnnnnnnnnnnnnnnnnnnnnnnnnnnnnnnnnnnnnnnnnnnnnnnnnnnnnnnnnnnnnnnnnnnnnnnnnnnnnnnnnnnnnnnnnnnnnnnnnnnnnnnnnnnnnnnnnnnnnnnnnnnnnnnnnnnnnnnnnnnnnnnnnnnnnnnnnnnnnnnnnnnnnnnnnnnnnnnnnnnnnnnnnnnnnnnnnnnnnnnnnnnnnnnnnnnnnnnnnnnnnnnnnnnnnnnnnnnnnnnnnnnnnnnnnnnnnnnnnnnnnnnnnnnnnnnnnnnnnnnnnnnnnnnnnnnnnnnnnnnnnnnnnnnnnnnnnnnnnnnnnnnnnnnnnnnnnnnnnnnnnnnnnnnnnnnnnnnnnnnnnnnnnnnnnnnnnnnnnnnnnnnnnnnnnnnnnnnnnnnnnnnnnnnnnnnnnnnnnnnnnnnnnnnnnnnnnnnnnnnnnnnnnnnnnnnnnnnnnnnnnnnnnnnnnnnnnnnnnnnnnnnnnnnnnnnnnnnnnnnnnnnnnnnnnnnnnnnnnnnnnnnnnnnnnnnnnnnnnnnnnnnnnnnnnnnnnnnnnnnnnnnnnnnnnnnnnnnnnnnnnnnnnnnnnnnntgctgaaacgttcctgggtcttccaaaacccagtctggacatatgcccaagtacgaaatcatcatatgaacctgctggaaccttcgaatcccgtttacgaggtcgtttacttaaaaatccaatcttagtccattctttcaccttaaagctttcgaattgagaatttttattcaaattaactccgaacttcctgaaattcaattccgaccatgcgtacaagtcataatacctaaagtgaagctggtcatgccctcaaactactgaacaatgcactagagctcaaaacgaccggtcaggtcgttacactttcggcctcgcctagagtcctcctaacatagtagataggaaattgtgtaccttcctattcccgggccgggactccacttacctctatctcggatactgctaagtataggtacaactgcttgtctgacttgggagtatgaagcaaaggcaggctcgaaaggtaccgcttgagttattccaaggcttgttggcactccggggtccatgaaaagttcttcttcttcttcaataacaaaaagaaccgatggctcttgtcggaggaccttgaaatgaatcgacccaagggggctatgttctcggttagcctttgaacgaatttgacattgtccaccatggtgatgtcctctatggctttgatcttttcgggattgatctcgattcaccagttggataccatgaatctgagaaacttcccggacccgactccaaatgcgcatttctccaagttcagattcatattgtatctcttcaatatactaaaggtttcctgcaaatattttaaatggtcctctgcttgcagggacttaactaacatgtcgtcaatgtaaacctccattgattttcctatttactcttcgaacatccgatttaccaagcgttggtaagtttcttggtcatacagtctaccatatttaattatacacggagtaggcatcgagaaagctgagtatctcatggtcgtccattgcatagatcatgcaatcgatgttaggcaaagggaaaaagtctttggggcatgccttgtttaagtctttatagtctacatacattctcaatttatttccctttttaggcactaccgctacatttgctaaacaatccgagtacttaacttcccgaatggagcatattttaagaagtttggatacttcgtctttgataaacgcatgcttgacttcagaccgaggcctcttcttctgtttaaccgggtgaaacttcgaatccaagctcagcttctgagtagttattttcggtgggatccatgtcatgtcaagatgggaccaagagaagcaatctatgttagctataagtaattcaatgagttttttcctaagcccgggagttagtcccgtgcccaggtatacctttcgatcgggcaggtgctcgatcaacttgacttgctccagctcctacaatgtttacttggtggcatcagaatagtcaggggctattgaagtcctagggactctgtagtcatcatccttgcatgtcacctgcttttatggttcggttggggctggcgtcagtgattgatatttggtttctcccttggtgactgaactcgagctcttcgatgtcgaaagtgtggatatcgggaccacctcatcgaccacgaacatttcttttgcagtcgattgttctccgtaaactattttgatccctcccagtgtaggaaatatcaatgcctaatgtagcattgagggtatctccctcatgttatgaatccatggcctcctgaataaagcattgtacctcatatctccttcgatcacgtagaactttgtttcttaaatggtcctggcggtgtttaccggtagggttatctcccctttagtggtctcgcatgcaatgttgaatccctttaagactcagactgcaggcactatttggttttgcatacctagttgttccacgatccttgatcttatgatattggccgagctacctgaatcaattaacacacgcttaactagagatttattttttagtacagatattaccagtgcatcattgtggggttgcatgatgcctttaacgtcctcgttgttgaaagatacggttccctctggtacatagtctcgagcccgtttttcccttgcaatggatactttagtgcattttaacatcgacccttggggatgtcaacttcaccaatgatcatgttaatgatgtgttgaggttcctcttctcaatctatttgttggtgtccctattcctgaagtgatttttggctcgatcacttagaaattctcggaggtgcctgttgttgaataaccgggctacttcttccctcagttgtcggcagtctttggttctgtagccgtgggtgccatgatatttacacattagattggggtccctttgggcaggatcagactgcaatggccgaggccactagtatctttaatacgtctgatggctgatacgataccgacaacatcgacgttaaagttgtattccgataaccttggtgcttctttggacccgataggtctgtcaaaaccgttctttctcatgagtccccaattattatgacctcgataactccttctttactccttgcaggggtgcgtccagacccactgctccttcaatctccactctacgattgatactaatctctgttcgatcttggctcatgatcgacgtctcttttggatctgtcactggtcctaacggggtaaatggacccagaaagggtctcgagctaatcatctttgaccctgatttttgtttggtgtctgttatggacgtcgacccaagttacagccgggtattctttcaaaatttgcttcaactgttgtgaagccaacgagctttggggattgagtccttgggtgaatacctgaacggctcaatcgtctacgactggaggcagatccttccgttccatttgaaaccttgacatgaactccctgagtatctcgttacatctttgctttaccttgaaaaggtctgacttcctggtctcgaccttgatggctccggcgtgcacttttacaaaggcatctgcaagcatagtaaacgagtcaatagaattaggggggtaagttggaataccatatcatagctccttttggcaaggtctctccaaccattttcagtagaacagattcgatttcatcatcctccaagtcgttccctttgatggcgcatatgtacgaggttacatgttcatttggatcagtcgttccattatacttcgggatttcgggcttatgaaacttttttgggatcgacttcagatatgcgctcgaggggaaagccttttggacaaacttcttggaatccaggcctttcagtatcggtggtgctcctggattttggtcgaccctggagttataggtctccacctttttgtcgttagcttcgattttcttttctcctatttctacccgttccgtcaattcctcgagcatatttattatctcggggttggccccggattcatcttcactcgcctttttgtggctggttaatttctgcgagtgtttttccggaattgttcgggctcaactctactgggagcaaggctttggttctgcaactgggctatcgctgcttgttaagcctgtagcatttcgaagatcacccgctagttgatctcatcgcctttatcgttgtgcgtatccctggctatcgacctggctcccacgcgaacactattttacggatcggtgggaaagttagcatcaatggccacatgggagttggcatcgattggacctgcgaccggcaccccgtaggggtcagcatggtgaacctcgttgctgggcactatattgttgttctcgccgtggtggccagattcagcatcaacgtttaggtgagcaaattgagagtttgacatctttaagatttcgtaaaattaagatctcaaagaacaagagaaaagtagagtgtgttatggaaatttgtatcaaatagccactattatccttagccccatggtgagcgccaaactgtttaccctaaagaacggataacaattaaatttatatgtgattttaaggatatgcggattaattctatacaaatgataaatagcgttagattaaatagataaaggccgtaataaattatcataccacttaagaggaatgactccgggatcggttatagccttaatggagtgcctgtcttcgatcccagattttcaaaaacgaagcactgatgaacaaaagtaagagctttgaataatagagaaaatgagagtatattgccttggtgtgcgtgttaaaatgtgtttaatgaataatcagaccccccccccccttttatatagtcggggagttttagcctaagtacaattgcataaaagataaaaatcttccgtttaaataatcaccggttctctttcgatacgtgctgagattcacgtcgtgatatccggctggtcgcggatattaaagtcttttgttgatcgtgttcggttacctggtaatgctctccgaggcctttggggttcgaaccggacatggggccatgaccccgatactctcgagggcaagtgttttacccggacgctggatcgaggagctccttgcctcgattccggttccttgccttcacgtctctcgctccgtttgtttcatcgaaaatcgaagcgtctcgtgggatcggtttcactcgtatacaaaaataaaaagatacaatcttcctcgtgaattcagttgatgactagccttccgttttttctttccagcttttggaatgagtattggatatacgatttccacattattattgtttctcttcattgaaatctccactgccatgaaaaccgagatcgaaattttaatttggatagtgttttttggttatttagtttggttttagaatgagaaattaaaatttttaatttttttggttttgtttgggatttaagaaaataaaaaacgaaaacccaaattttttttatatatattatacagaaaagggctatatatgtccctctactatcgaatattagttatttatatcctctgttatactatttgacgtttcttacccttgtcgttagcctttttaacaaatctgcccctcccattgacggccccagtctgtgcggacacgtggcacatttttagaacccaaaccctttttctttccccacccaagatccatgcccgaaatctatactaaacccatatcaataataagaagcaagcttagtttattaagtgccttaatgcattgtctttcatcattgcaagaaaccatcaaatcaaaaccccgaaagtgaaaaataaaaccctgctactacctaattgattgattaaaaacaaaaactcgtgaaggggcgaaatatatcacgattaaaaagaaataaaaggtttacatcttcttcgttctatgctccttccttaagcaaaatgagggcttcagattcagtaggtagagctgggattggtcatttcttggttgttgtgatggctctacatgcacaggcaaaccttagtacttccttcaaccttgcttcatcttgcatttttagttttccacaaattaatttacccccgttatgatgatgtccatctcattgaagaagtattaggcatgtgcctaataagagttttctttggtttggtagccaaccttgttgacttggtttnnnnnnnnnnnnnnnnnnnnnnnnnnnnnnnnnnnnnnnnnnnnnnnnnnnnnnnnnnnnnnnnnnnnnnnnnnnnnnnnnnnnnnnnnnnnnnnnnnnnnnnnnnnnnnnnnnnnnnnnnnnnnnnnnnnnnnnnnnnnnnnnnnnnnnnnnnnnnnnnnnnnnnnnnnnnnnnnnnnnnnnnnnnnnnnnnnnnnnnnnnnnnnnnnnnnnnnnnnnnnnnnnnnnnnnnnnnnnnnnnnnnnnnnnnnnnnnnnnnnnnnnnnnnnnnnnnnnnnnnnnnnnnnnnnnnnnnnnnnnnnnnnnnnnnnnnnnnnnnnnnnnnnnnnnnnnnnnnnnnnnnnnnnnnnnnnnnnnnnnnnnnnnnnnnnnnnnnnnnnnnnnnnnnnnnnnnnnnnnnnnnnnnnnnnnnnnnnnnnnnnnnnnnnnnnnnnnnnnnnnnnnnnnnnnnnnnnnnnnnnnnnnnnnnnnnnnnnnnnnnnnnnnnnnnnnnnnnnnnnnnnnnnnnnnnnnnnnnnnnnnnnnnnnnnnnnnnnnnnnnnnnnnnnnnnnnnnnnnnnnnnnnnnnnnnnnnnnnnnnnnnnnnnnnnnnnnnnnnnnnnnnnnnnnnnnnnnnnnnnnnnnnnnnnnnnnnnnnnnnnnnnnnnnnnnnnnnnnnnnnnnnnnnnnnnnnnnnnnnnnnnnnnnnnnnnnnnnnnnnnnnnnnnnnnnnnnnnnnnnnnnnnnnnnnnnnnnnnnnnnnnnnnnnnnnnnnnnnnnnnnnnnnnnnnnnnnnnnnnnnnnnnnnnnnnnnnnnnnnnnnnnnnnnnnnnnnnnnnnnnnnnnnnnnnnnnnnnnnnnnnnnnnnnnnnnnnnnnnnnnnnnnnnnnnnnnnnnnnnnnnnnnnnnnnnnnnnnnnnnnnnnnnnnnnnnnnnnnnnnnnnnnnnnnnnnnnnnnnnnnnnnnnnnnnnnnnnnnnnnnnnnnnnnnnnnggcgatatcgtagtgaggtgggaatatcaaaagagggttatttcttttgagtgttgtagtggtctttggagtatttatctccgacctacaaagtgtaaaannnnnnnnnnnnnnnnnnnnnnnnnnnnnnnnnnnnnnnnnnnnnnnnnnnnnnnnnnnnnnnnnnnnnnnnnnnnnnnnnnnnnnnnnnnnnnnnnnnnnnnnnnnnnnnnnnnnnnnnnnnnnnnnnnnnnnnnnnnnnnnnnnnnnnnnnnnnnnnnnnnnnnnnnnnnnnnnnnnnnnnnnnnnnnnnnnnnnnnnnnnnnnnnnnnnnnnnnnnnnnnnnnnnnnnnnnnnnnnnnnnnnnnnnnnnnnnnnnnnnnnnnnnnnnnnnnnnnnnnnnnnnnnnnnnnnnnnnnnnnnnnnnnnnnnnnnnnnnnnnnnnnnnnnnnnnnnnnnnnnnnnnnnnnnnnnnnnnnnnnnnnnnnnnnnnnnnnnnnnnnnnnnnnnnnnnnnnnnnnnnnnnnnnnnnnnnnnnnnnnnnnnnnnnnnnnnnnnnnnnnnnnnnnnnnnnnnnnnnnnnnnnnnnnnnnnnnnnnnnnnnnnnnnnnnnnnnnnnnnnnnnnnnnnnnnnnnnnnnnnnnnnnnnnnnnnnnnnnnnnnnnnnnnnnnnnnnnnnnnnnnnnnnnnnnnnnnnnnnnnnnnnnnnnnnnnnnnnnnnnnnnnnnnnnnnnnnnnnnnnnnnnnnnnnnnnnnnnnnnnnnnnnnnnnnnnnnnnnnnnnnnnnnnnnnnnnnnnnnnnnnnnnnnnnnnnnnnnnnnnnnnnnnnnnnnnnnnnnnnnnnnnnnnnnnnnnnnnnnnnnnnnnnnnnnnnnnnnnnnnnnnnnnnnnnnnnnnnnnnnnnnnnnnnnnnnnnnnnnnnnnnnnnnnnnnnnnnnnnnnnnnnnnnnnnnnnnnnnnnnnnnnnnnnnnnnnnnnnnnnnnnnnnnnnnnnnnnnnnnnnnnnnnnnnnnnnnnnnnnnnnnnnnnnnnnnnnnnnnnnnnnnnnnnnnnnnnnnnnnnnnnnnnnnnnnnnnnnnnnnnnnnnnnnnnnnnnnnnnnnnnnnnnnnnnnnnnnnnnnnnnnnnnnnnnnnnnnnnnnnnnnnnnnnnnnnnnnnnnnnnnnnnnnnnnnnnnnnnnnnnnnnnnnnnnnnnnnnnnnnnnnnnnnnnnnnnnnnnnnnnnnnnnnnnnnnnnnnnnnnnnnnnnnnnnnnnnnnnnnnnnnnnnnnnnnnnnnnnnnnnnnnnnnnnnnnnnnnnnnnnnnnnnnnnnnnnnnnnnnnnnnnnnnnnnnnnnnnnnnnnnnnnnnnnnnnnnnnnnnnnnnnnnnnnnnnnnnnnnnnnnnnnnnnnnnnnnnnnnnnnnnnnnnnnnnnnnnnnnnnnnnnnnnnnnnnnnnnnnnnnnnnnnnnnnnnnnnnnnnnnnnnnnnnnnnnnnnnnnnnnnnnnnnnnnnnnnnnnnnnnnnnnnnnnnnnnnnnnnnnnnnnnnnnnnnnnnnnnnnnnnnnnnnnnnnnnnnnnnnnnnnnnnnnnnnnnnnnnnnnnnnnnnnnnnnnnnnnnnnnnnnnnnnnnnnnnnnnnnnnnnnnnnnnnnnnnnnnnnnnnnnnnnnnnnnnnnnnnnnnnnnnnnnnnnnnnnnnnnnnnnnnnnnnnnnnnnnnnnnnnnnnnnnnnnnnnnnnnnnnnnnnnnnnnnnnnnnnnnnnnnnnnnnnnnnnnnnnnnnnnnnnnnnnnnnnnnnnnnnnnnnnnnnnnnnnnnnnnnnnnnnnnnnnnnnnnnnnnnnnnnnnnnnnnnnnnnnnnnnnnnnnnnnnnnnnnnnnnnnnnnnnnnnnnnnnnnnnnnnnnnnnnnnnnnnnnnnnnnnnnnnnnnnnnnnnnnnnnnnnnnnnnnnnnnnnnnnnnnnnnnnnnnnnnnnnnnnnnnnnnnnnnnnnnnnnnnnnnnnnnnnnnnnnnnnnnnnnnnnnnnnnnnnnnnnnnnnnnnnnnnnnnnnnnnnnnnnnnnnnnnnnnnnnnnnnnnnnnnnnnnnnnnnnnnnnnnnnnnnnnnnnnnnnnnnnnnnnnnnnnnnnnnnnnnnnnnnnnnnnnnnnnnnnnnnnnnnnnnnnnnnnnnnnnnnnnnnnnnnnnnnnnnnnnnnnnnnnnnnnnnnnnnnnnnnnnnnnnnnnnnnnnnnnnnnnnnnnnnnnnnnnnnnnnnnnnnnnnnnnnnnnnnnnnnnnnnnnnnnnnnnnnnnnnnnnnnnnnnnnnnnnnnnnnnnnnnnnnnnnnnnnnnnnnnnnnnnnnnnnnnnnnnnnnnnnnnnnnnnnnnnnnntccaaaggtacaactgtaaaaccttgtgactactgtttagttggtaagcagcatagagtctcatttcagacatcgtctgaaagaaaattgaatatacttgatttagtatattctgatgtttgtggtccaatggaaattgaatcaatgggcggtaacaaatattttgttacttttattgatgatgcttcacgaaaattatgggtttatattttgaaaaccaaagatcaggtgtttcaagttttccagaagtttcatgctctagtgaaagggagacgggcgaaaagctaaagcgtcttcgaagtgacaatagaggtgagtacacttcaagggaattcgaagagtattgttcaagtcatgggatcagacatgaaaagacagttcctggaaccccacagcacaatggcgtagccgagaagatgaaccgcaccattgtggagaagatgagaagcatgctcagaatggctaaactgcctaagtcattctggggtgaagcagttcagacagcctgttacctgatcaataggagtccatcagttccgttggcgtttgacatcccagagagagtttggaccaacaaggaggtgtcctactcgcatctgaaggtgttcggttgcagagcttttgcacatgtaccaaaggagcagagaacaaagctggatgataaatctgttccctgcatattcatcggatatggagatgaagagttcggatacagattgtgggatcctgtaaagaagaaggtcatcagaagcagagatgtagtcttccgagaaagtgaagttggaactgctgatgatatgtcagagaaaggccaagaatggtataattcctaaccttgttactattccttctacttctaacaatcccacaagtgcagaaagtacgaccgacgaggttgccgagcagggggagcaacctggtgaggttattgagcagggggagcaacttgatgatggtgtcgaggaagtggagcaccccactcaggagaagaacaacctcaacctctgaggagatcagagaggccaagggtagagtcatgcaggtacccttccacagagtatgtcctcatcagtgatgagggggagccagaaagtcttaaggaggtgttgtcccatccagaaaagaaccagtggatgaaagccatgcaagaagagatggaatctctacagaaaaatggcacgtacaagctggttgaacttccaaagggtaaaagaccactcaaatgcaaatgggtctttaaactcaagaaagatggaaatggcaagctggtcagatacaaagctcgattggtggttaaaggcttcgaacagaagaaaggtattgattttgacgaaattttctcacctgttgtcaaaatgacttctattcgaacaattttgagcttagcagctagcctagatcttgaagtggagcagttggatgtgaaaactgcatttcttcatggagatttggaagaggagatttatatggagcagccagaaggatttgaagtagctggaaagaaacacatggtgtgcaaattgaataagagtctttatggattgaagcaggcaccaaggcagtggtacatgaagtttgactcattcatgaaaagtcaaacatacctaaagacctattctgatccatgtgtatacttcaaaagattttctgagaataactttattatattgttgttgtatgtggatgacatgttaattgtaggaaaagacaaggggtgatcgcaaagttgaagggagatttgtccaagtcatttgatatgaaggacttgggcccagcacaacaaattctagggatgaagatagttcgagagagaacaagtagaaagttgtggctatctcaggagaagtacattgaacgtgtactagaacgcttcaacatgaagaatgctaagccagtcagcacacctcttgctagtcatctaaagttgagcaagaagatgtgtcctacaacagtggaggagaaagggaacatggctagagttccttattcttcagcagtcggaagcttgatgtatgcaatggtatgcactagacctgatattgctcacgcagttggtgttgtcagcaggtttcttaaaaatcctggaaaggaacattgggaagcagtcaagtggatactcaggtacctcagaggtaccacgggagattgtttgtgctttggatgatctgatccaatcttgaagggctatacaaatgttgatatggcgggtgacattgacaacagaaaatccactactggatatttgtttacattttcagggggagctatatcatggcagtctaagttgnnnnnnnnnnnnnnnnnnnnnnnnnnnnnnnnnnnnnnnnnnnnnnnnnnnnnnnnnnnnnnnnnnnnnnnnnnnnnnnnnnnnnnnnnnnnnnnnnnnnnnnnnnnnnnnnnnnnnnnnnnnnnnnnnnnnnnnnnnnnnnnnnnnnnnnnnnnnnnnnnnnnnnnnnnnnnnnnnnnnnnnnnnnnnnnnnnnnnnnnnnnnnnnnnnnnnnnnnnnnnnnnnnnnnnnnnnnnnnnnnnnnnnnnnnnnnnnnnnnnnnnnnnnnnnnnnnnnnnnnnnnnnnnnnnnnnnnnnnnnnnnnnnnnnnnnnnnnnnnnnnnnnnnnnnnnnnnnnnnnnnnnnnnnnnnnnnnnnnnnnnnnnnnnnnnnnnnnnnnnnnnnnnnnnnnnnnnnnnnnnnnnnnnnnnnnnnnnnnnnnnnnnnnnnnnnnnnnnnnnnnnnnnnnnnnnnnnnnnnnnnnnnnnnnnnnnnnnnnnnnnnnnnnnnnnnnnnnnnnnnnnnnnnnnnnnnnnnnnnnnnnnnnnnnnnnnnnnnnnnnnnnnnnnnnnnnnnnnnnnnnnnnnnnnnnnnnnnnnnnnnnnnnnnnnnnnnnnnnnnnnnnnnnnnnnnnnnnnnnnnnnnnnnnnnnnnnnnnnnnnnnnnnnnnnnnnnnnnnnnnnnnnnnnnnnnnnnnnnnnnnnnnnnnnnnnnnnnnnnnnnnnnnnnnnnnnnnnnnnnnnnnnnnnnnnnnnnnnnnnnnnnnnnnnnnnnnnnnnnnnnnnnnnnnnnnnnnnnnnnnnnnnnnnnnnnnnnnnnnnnnnnnnnnnnnnnnnnnnnnnnnnnnnnnnnnnnnnnnnnnnnnnnnnnnnnnnnnnnnnnnnnnnnnnnnnnnnnnnnnnnnnnnnnnnnnnnnnnnnnnnnnnnnnnnnnnnnnnnnnnnnnnnnnnnnnnnnnnnnnnnnnnnnnnnnnnnnnnnnnnnnnnnnnnnnnnnnnnnnnnnnnnnnnnnnnnnnnnnnnnnnnnnnnnnnnnnnnnnnnnnnnnnnnnnnnnnnnnnnnnnnnnnnnnnnnnnnnnnnnnnnnnnnnnnnnnnnnnnnnnnnnnnnnnnnnnnnnnnnnnnnnnnnnnnnnnnnnnnnnnnnnnnnnnnnnnnnnnnnnnnnnnnnnnnnnnnnnnnnnnnnnnnnnnnnnnnnnnnnnnnnnnnnnnnnnnnnnnnnnnnnnnnnnnnnnnnnnnnnnnnnnnnnnnnnnnnnnnnnnnnnnnnnnnnnnnnnnnnnnnnnnnnnnnnnnnnnnnnnnnnnnnnnnnnnnnnnnnnnnnnnnnnnnnnnnnnnnnnnnnnnnnnnnnnnnnnnnnnnnnnnnnnnnnnnnnnnnnnnnnnnnnnnnnnnnnnnnnnnnnnnnnnnnnnnnnnnnnnnnnnnnnnnnnnnnnnnnnnnnnnnnnnnnnnnnnnnnnnnnnnnnnnnnnnnnnnnnnnnnnnnnnnnnnnnnnnnnnnnnnnnnnnnnnnnnnnnnnnnnnnnnnnnnnnnnnnnnnnnnnnnnnnnnnnnnnnnnnnnnnnnnnnnnnnnnnnnnnnnnnnnnnnnnnnnnnnnnnnnnnnnnnnnnnnnnnnnnnnnnnnnnnnnnnnnnnnnnnnnnnnnnnnnnnnnnnnnnnnnnnnnnnnnnnnnnnnnnnnnnnnnnnnnnnnnnnnnnnnnnnnnnnnnnnnnnnnnnnnnnnnnnnnnnnnnnnnnnnnnnnnnnnnnnnnnnnnnnnnnnnnnnnnnnnnnnnnnnnnnnnnnnnnnnnnnnnnnnnnnnnnnnnnnnnnnnnnnnnnnnnnnnnnnnnnnnnnnnnnnnnnnnnnnnnnnnnnnnnnnnnnnnnnnnnnnnnnnnnnnnnnnnnnnnnnnnnnnnnnnnnnnnnnnnnnnnnnnnnnnnnnnnnnnnnnnnnnnnnnnnnnnnnnnnnnnnnnnnnnnnnnnnnnnnnnnnnnnnnnnnnnnnnnnnnnnnnnnnnnnnnnnnnnnnnnnnnnnnnnnnnnnnnnnnnnnnnnnnnnnnnnnnnnnnnnnnnnnnnnnnnnnnnnnnnnnnnnnnnnnnnnnnnnnnnnnnnnnnnnnnnnnnnnnnnnnnnnnnnnnnnnnnnnnnnnnnnnnnnnnnnnnnnnnnnnnnnnnnnnnnnnnnnnnnnnnnnnnnnnnnnnnnnnnnnnnnnnnnnnnnnnnnnnnnnnnnnnnnnnnnnnnnnnnnnnnnnnnnnnnnnnnnnnnnnnnnnnnnnnnnnnnnnnnnnnnnnnnnnnnnnnnnnnnnnnnnnnnnnnnnnnnnnnnnnnnnnnnnnnnnnnnnnnnnnnnnnnnnnnnnnnnnnnnnnnnnnnnnnnnnnnnnnnnnnnnnnnnnnnnnnnnnnnnnnnnnnnnnnnnnnnnnnnnnnnnnnnnnnnnnnnnnnnnnnnnnnnnnnnnnnnnnnnnnnnnnnnnnnnnnnnnnnnnnnnnnnnnnnnnnnnnnnnnnnnnnnnnnnnnnnnnnnnnnnnnnnnnnnnnnnnnnnnnnnnnnnnnnnnnnnnnnnnnnnnnnnnnnnnnnnnnnnnnnnnnnnnnnnnnnnnnnnnnnnnnnnnnnnnnnnnnnnnnnnnnnnnnnnnnnnnnnnnnnnnnnnnnnnnnnnnnnnnnnnnnnnnnnnnnnnnnnnnnnnnnnnnnnnnnnnnnnnnnnnnnnnnnnnnnnnnncaacacattatttatttataaacaagcttaatttgggataagaaattataaaggtattaccgttaatgggaggggcatatttgttaaaaaggctaacgacaaaggtaagaaatataacggagtttataaataattaatatccgatagtactagatatataaggtctcattattcatctttaaatacaaccccttattctcgttactaagtagtattttgattgggaaactttcatcgagcttctttaacttttaatatttacgagcaaaaatcagtctcatttgcacttgaattataatttattgtatttttatacctggacatgttactattaatattgtcttttaaaagttttaaccgtgactaatattaacaactctattttaagagatataatatgattacttctcattctctatgatattttttgccatagaatataaatatttaattatgttttttttttaatttttattcttctattatgcccaaagatctatttcttttcgattatgttaattatcttatactagtattagtacccgtgcgatgcgtggacaaatcatatcaaattgtgatgtagattgtttgaatcatgtgcaattaacctcaaaatataaacctctcagataaaaattatataatcattagatattaattaagaagcaggatatgaaattattgtttaaatctcgtaatggacaacctatttttgtctatattagtagtcaaactagtactagtatcatcagacactagttgtatgaggcattttttttatctcacatttttgtggactcatgtttttatggatccagaagtataagattagggtccacgagataaaaaaaagtcttatacaattcatgtaagttgtgtgagacacataataaaacttaataaaactttacttgctggatctgtacgtttgctattatccatgttttgaatatgaaacttgagcatccagcgaagagttgattttgtgctatctttcttacgtgttgacttgtcattcattgagttggcttttcatttaccttaaagacagacgtactatattattaatcaaaactagtagtcgtacccgtgcgatatgcggtaaatattaaaaaaatattaattaaattaaattatgatcgggtttgtttgatcctattagatcttattgctttattaaatttaaattgtcatcttattgtctatacgatatacccaataataaaatctctattaacttaaagatacttatatagtcagnnnnnnnnnnnnnnnnnnnnnnnnnnnnnnnnnnnnnnnnnnnnnnnnnnnnnnntgtaacttttttgttctatatttttctttattacgttatccattgtttagtattattacattgtcaatagaaatttttattagtatattactttgtttactccaaaccctacaatgtgagatattactgggtacgttgttattgtatattactttgtttactatttttgtctgctcactttctttttctaatataagagaagatatataattaattgttgttgaaatattttnnnnnnnnnnnnnnnnnnnnnnnnnnnnnnnnnnnnnnnnnnnnnnnnnnnnnnnnnnnnnnnnnnnnnnnnnnnnnnnnnnnnnnnnnnnnnnnnnnnnnnnnnnnnnnnnnnnnnnnnnnnnnnnnnnnnnnnnnnnnnnnnnnnnnnnnnnnnnnnnnnnnnnnnnnnnnnnnnnnnnnnnnnnnnnnnnnnnnnnnnnnnnnnnnnnnnnnnnnnnnnnnnnnnnnnnnnnnnnnnnnnnnnnnnnnnnnnnnnnnnnnnnnnnnttctttattttatcatccaatatttagtattattacattgttaataaaaaaatttattatcatattatttatttaatatttttctctgctactttatttttgtaatataatagaagatatatattttattaatcttgcaataatnnnnnnnnnnnnnnnnnnnnnnnnnnnnnnnnnnnnnnnnnnnnnnnnnnnnnnnnnnnnnnnnnnnnnnnnnnnnnnnnnnnnnnnnnnnnnnnnnnnnnnnnnnnnnnnnnnnnnnnnnnnnnnnnnnnnnnnnnnnnnnnnnnnnnnnnnnnnnnnnnnnnnnnnnnnnnnnnnnnnnnnnnnnnnnnnnnnnnnnnnnnnnnnnnnnnnnnnnnnnnnnnnnnnnnnnnnnnnnnnnnnnnnnnnnnnnnnnnnnnnnnnnnnnnnnnnnnnnnnnnnnnnnnnnnnnnnnnnnnnnnnnnnnnnnnnnnnnnnnnnnnnnnnnnnnnnnnnnnnnnnnnnnnnnnnnnnnnnnnnnnnnnnnnnnnnnnnnnnnnnnnnnnnnnnctggactttaatgaacaaattttcgattaaattaaagggacttatgtagtcatcgaataacttttttttatgtatttatctttattatatcactcannnnnnnnnnnnnnnnnnnnnnnnnnnnnnnnnnnnnnnnnnnnnnnnnnnnnnnnnnnnnnnnnnnnnnnnnnnnnnnnnnnnnnnnnnnnnnnnnnnnnnnnnnnnnnnnnnnnnnnnnnnnnnnnnnnnnnnnnnnnnnnnnnnnnnnnnnnnnnnnnnnnnnnnnnnnnnnnnnnnnnnnnnnnnnnnnnnnnnnnnnnnnnnnnnnnnnnnnnnnnnnnnnnnnnnnnnnnnnnnnnnnnnnnnnnnnnnnnnnnnnnnnnnnnnnnnnnnnnnnnnnnnnnnnnnnnnnnnnnnnnnnnnnnnnnnnnnnnnnnnnnnnnnnnnnnnnnnnnnnnnnnnnnnnnnnnnnnnnnnnnnnnnnnnnnnnnnnnnnnnnnnnnnnnnnnnnnnnnnnnnnnnnnnnnnnnnnnnnnnnnnnnnnnnnnnnnnnnnnnnnnnnnnnnnnnnnnnnnnnnnnnnnnnnnnnnnnnnnnnnnnnnnnnnnnnnnnnnnnnnnnnnnnnnnnnnnnnnnnnnnnnnnnnnnnnnnnnnnnnnnnnnnnnnnnnnnnnnnnnnnnnnnnnnnnnnnnnnnnnnnnnnnnnnnnnnnnnnnnnnnnnnnnnnnnnnnnnnnnnnnnnnnnnnnnnnnnnnnnnnnnnnnnnnnnnnnnnnnnnnnnnnnnnnnnnnnnnnnnnnnnnnnnnnnnnnnnnnnnnnnnnnnnnnnnnnnnnnnnnnnnnnnnnnnnnnnnnnnnnnnnnnnnnnnnnnnnnnnnnnnnnnnnnnnnnnnnnnnnnnnnnnnnnnnnnnnnnnnnnnnnnnnnnnnnnnnnnnnnnnnnnnnnnnnnnnnnnnnnnnnnnnnnnnnnnnnnnnnnnnnnnnnnnnnnnnnnnnnnnnnnnnnnnnnnnnnnnnnnnnnnnnnnnnnnnnnnnnnnnnnnnnnnnnnnnnnnnnnnnnnnnnnnnnnnnnnnnnnnnnnnnnnnnnnnnnnnnnnnnnnnnnnnnnnnnnnnnnnnnnnnnnnnnnnnnnnnnnnnnnnnnnnnnnnnnnnnnnnnnnnnnnnnnnnnnnnnnnnnnnnnnnnnnnnnnnnnnnnnnnnnnnnnnnnnnnnnnnnnnnnnnnnnnnnnnnnnnnnnnnnnnnnnnnnnnnnnnnnnnnnnnnnnnnnnnnnnnnnnnnnnnnnnnnnnnnnnnnnnnnnnnnnnnnnnnnnnnnnnnnnnnnnnnnnnnnnnnnnnnnnnnnnnnnnnnnnnnnnnnnnnnnnnnnnnnnnnnnnnnnnnnnnnnnnnnnnnnnnnnnnnnnnnnnnnnnnnnnnnnnnnnnnnnnnnnnnnnnnnnnnnnnnnnnnnnnnnnnnnnnnnnnnnnnnnnnnnnnnnnnnnnnnnnnnnnnnnnnnnnnnnnnnnnnnnnnnnnnnnnnnnnnnnnnnnnnnnnnnnnnnnnnnnnnnnnnnnnnnnnnnnnnnnnnnnnnnnnnnnnnnnnnnnnnnnnnnnnnnnnnnnnnnnnnnnnnnnnnnnnnnnnnnnnnnnnnnnnnnnnnnnnnnnnnnnnnnnnnnnnnnnnnnnnnnnnnnnnnnnnnnnnnnnnnnnnnnnnnnnnnnnnnnnnnnnnnnnnnnnnnnnnnnnnnnnnnnnnnnnnnnnnnnnnnnnnnnnnnnnnnnnnnnnnnnnnnnnnnnnnnnnnnnnnnnnnnnnnnnnnnnnnnnnnnnnnnnnnnnnnnnnnnnnnnnnnnnnnnnnnnnnnnnnnnnnnnnnnnnnnnnnnnnnnnnnnnnnnnnnnnnnnnnnnnnnnnnnnnnnnnnnnnnnnnnnnnnnnnnnnnnnnnnnnnnnnnnnnnnnnnnnnnnnnnnnnnnnnnnnnnnnnnnnnnnnnnnnnnnnnnnnnnnnnnnnnnnnnnnnnnnnnnnnnnnnnnnnnnnnnnnnnnnnnnnnnnnnnnnnnnnnnnnnnnnnnnnnnnnnnnnnnnnnnnnnnnnnnnnnnnnnnnnnnnnnnnnnnnnnnnnnnnnnnnnnnnnnnnnnnnnnnnnnnnnnnnnnnnnnnnnnnnnnnnnnnnnnnnnnnnnnnnnnnnnnnnnnnnnnnnnnnnnnnnnnnnnnnnnnnnnnnnnnnnnnnnnnnnnnnnnnnnnnnnnnnnnnnnnnnnnnnnnnnnnnnnnnnnnnnnnnnnnnnnnnnnnnnnnnnnnnnnnnnnnnnnnnnnnnnnnnnnnnnnnnnnnnnnnnnnnnnnnnnnnnnnnnnnnnnnnnnnnnttttattttaaaataatttaaacactccaacttaaaactactcccgccaatttgaacgggtagttatttttattatatatttatatttttcgttttttattataactaattataagatctngttaaaaaaattttattatcatattatttatttaatatttttctctgctactttatttttgtaatataatagaagatatatattttattaatcttgcaataatnnnnnnnnnnnnnnnnnnnnnnnnnnnnnnnnnnnnnnnnnnnnnnnnnnnnnnnnnnnnnnnnnnnnnnnnnnnnnnnnnnnnnnnnnnnnnnnnnnnnnnnnnnnnnnnnnnnnnnnnnnnnnnnnnnnnnnnnnnnnnnnnnnnnnnnnnnnnnnnnnnnnnnnnnnnnnnnnnnnnnnnnnnnnnnnnnnnnnnnnnnnnnnnnnnnnnnnnnnnnnnnnnnnnnnnnnnnnnnnnnnnnnnnnnnnnnnnnnnnnnnnnnnnnnnnnnnnnnnnnnnnnnnnnnnnnnnnnnnnnnnnnnnnnnnnnnnnnnnnnnnnnnnnnnnattgtagttttttttattttttattattttcgttttttataaatatttaaattcaaaaataataactaaataattaattaaatatttaaattttattatattttctcaataatatttaattttagtgaataattacactttttattttgaaaaagaaaaacgaaaatgatttaacaaaatcaaataaagaaattaactaacccaaaccaaccatcacccatgtttgagtagttaattcaggtaattaatttctttgttaatttttaataaataattgttattaactaattgtgccatatgttttttattgctttattttaattttttaatttaaaataaacttaaaattccaacttgaaactactcctcaatttgaatgggtaaattttttttttacttttattttatttaaaaatattttaaaactccaacttgaaactactctccgatttgaatgggtagtttttctttttcttttttcatttaattattaaagcaaattattttattttaaaataattttaaaactacaacataaaactactcccgccaatttgaacgtgtagttatttttattatatatttatatttttcgttttttattataacaaattataagatctttttttttaattcaaataaagtaaccaatatatatatatatatatatatatatatatatatatannnnnnnnnnnnnnnnnnnnnnnnnnnnnnnnnnnnnnnnnnnnnnnnnnnnnnnnnnnnnnnnnnnnnnnnnnnnnnnnnnnnnnnnnnnnnnnnnnnnnnnnnnnnnnnnnnnnnnnnnnnnnnnnnnnnnnnnnnnnnnnnnnnnnnnnnnnnnnnnnnnnnnnnnnnnnnnnnnnnnnnnnnnnnnnnnnnnnnnnnnnnnnnnnnnnnnnnnnnnnnnnnnnnnnnnnnnnnnnnnnnnnnnnnnnnnnnnnnnnnnnnnnnnnnnnnnnnnnnnnnnnnnnnnnnnnnnnnnnnnnnnnnnnnnnnnnnnnnnnnnnnnnnnnnnnnnnnnnnnnnnnnnnnnnnnnnnnnnnnnnnnnnnnnnnnnnnnnnnnnnnnnnnnnnnnnnnnnnnnnnnnnnnnnnnnnnnnnnnnnnnnnnnnnnnnnnnnnnnnnnnnnnnnnnnnnnnnnnnnnnnnnnnnnnnnnttagtaactaattatatcatgtggctttttttaggctgccacttggcttaaggagagggctttatcctctccttttaataatatataaatattttattttaaaataatttaaaaactccaacttaaaactactcccgccaatttgaacgggtagttatttttattatatatttatatttttcgttttttattataactaattannnnnnnnnnnnnnnnnnnnnnnnnnnnnnnnnnnnnnnnnnnnnnnnnnnnnnnnnnnnnnnnnnnnnnnnnnnnnnnnnnnnnnnnnnnnnnnnnnnnnnnnnnnnnnnnnnnnnnnnnnnnnnnnnnnnnnnnnnnnntatatattgtagttttttcattttttattattttcgttttttataaatattttaattcaaaaataataactaataattaattaaataactaattatatcatgtggttttttttaggctgccacttggcttaaggagatggctttatcctctccttttaataatatatagatagatattttattttaaaataattttaaaactccaacttaaaactactcccgccaatttgaacgggtagttatttttattatatatttatatttnnnnnnnnnnnnnnnnnnnnnnnnnnnnnnnnnnnnnnnnnnnnnnnnnnnnnnnnnnnnnnnnnnnnnnnnnnnnnnnnnnnnnnnnnnnnnnnnnnnnnnnnnnnnnnnnnnnnnnnnnnnnnnnnnnnnnnnnnnnnnnnnnnnnnnnnnnnnnnnnnnnnnnnnnnnnnnnnnnnnnnnnnnnnnnnttgtagttttttcattttttaatattttcgttttttataaatatttaaattcaaaaataataactaataattaactaaataactaattagtaactaattatatcacgtggcttttttttaggctgccacttggcttaaggagagggctttatcctctccttttaataatatatagatttttattttaaaattaatttaaaactccaacttaaaacttctcccgtcaatttgaacgggtagttatttttattatatatttatatttttcattttttattataactaattataagatcttttttttaattcaaataaagtaaccaatatatatatatatatatatatatntaaaaataaacttaaaattccaacttaaaactactccccaatttgaattggtaatttttttttacttttattttttgttttaaaattattttaaaactccaacttgaaactactcttcgatttgaaagggtagtttttcttcttttgtttccatttaattattaaagctaattattttattttaaaataatttaaaactccaacttaaaactacttccgccaatttgaacgggtagttatttttattatatatttatatttttcgttttttattataactaattataagatctttttttttaattcaaataaagtaaccaatatatatatatatatatatatatatatatatatatatatatatatatatatatatataatgtagtttttttattttttattattttcgttttttataaatatttaaattcaaaaataataactaataattaactaaataactacttagtaactaattatatcatgtggcttttttttaggctgccacttggcttaaggagagggctttatcctctccttttaataatatatagatnnnnnnnnnnnnnnnnnnnnnnnnnnnnnnnnnnnnnnnnnnnnnnnnnnnnnnnnnnnnnnnnnnnnnnnnnnnnnnnnnnnnnnnnnnnnnnnnnnnnnnnnnnnnnnnnnnnnnnnnnnnnnnnnnnnnnnnnnnnnnnnnnnnnnnnnnnnnnnnnnnnnnnnnnnnnnnnnnnnnnnnnnnnnnnnnnnnnnnnnnnnnnnnnnnnnnnnnnnnnnnnnnnnnnnnnnnnnnnnnnnnnnnnnnnnnnnnnnnnnnnnnnnnnnnnnnnnnnnnnnnnnnnnnnnnnnnnnnnnnnnnnnnnnnnnnnnnnnnnnnnnnnnnnnnnnnnnnnnnnnnnnnnnnnnnnnnnnnnnnnnnnnnnnnnnnnnnnnnnnnnnnnnnnnnnnnnnnnnnnnnnnnnnnnnnnnnnnnnnnnnnnnnnnnnnnnnnnnnnnnnnnnnnnnnnnnnnnnnnnnnnnnnnnnnnnnnnnnnnnnnnnnnnnnnnnnnnnnnnnnnnnnnnnnnnnnnnnnnnnnnnnnnnnnnnnnnnnnnnnnnnnnnnnnnnnnnnnnnnnnnnnnnnnnnnnnnnnnnnnnnnnnnnnnnnnnnnnnnnnnnnnnnnnnnnnnnnnnnnnnnnnnnnnnnnnnnnnnnnnnnnnnnnnnnnnnnnnnnnnnnnnnnnnnnnnnnnnnnnnnnnnnnnnnnnnnnnnnnnnnnnnnnnnnnnnnnnnnnnnnnnnnnnnnnnnnnnnnnnnnnnnnnnnnnnnnnnnnnnnnnnnnnnnnnnnnnnnnnnnnnnnnnnnnnnnnnnnnnnnnnnnnnnnnnnnnnnnnnnnnnnnnnnnnnnnnnnnnnnnnnnnnnnnnnnnnnnnnnnnnnnnnnnnnnnnnnnnnnnnnnnnnnnnnnnnnnnnnnnnnnnnnnnnnnnnnnnnnnnnnnnnnnnnnnnnnnnnnnnnnnnnnnnnnnnnnnnnnnnnnnnnnnnnnnnnnnnnnnnnnnnnnnnnnnnnnnnnnnnnnnnnnnnnnnnnnnnnnnnnnnnnnnnnnnnnnnnnnnnnntattgtagttttttcattttttattattttcgttttttataaatatttaaattcaaaaataataactaataattaactgaataactaattagtaactaattatatcatgtggcttttttttaggctgccacttggcttaaggagagggctttatcctctccttttaataatatatagataaccattacgcttccggtattggggatgatatcctttcttttggggtaccattaattcattaatttgtacaaagtgatagagcttgacgtttactcatatgcccctttcttatgtggtatgcatatagatgctgaaattttaacagatcaagataaatcctaaatttatgattattcttaaaataataggagtctatcaggattacttggtggctactccactgtcacgacccggactttctaccctcgggaatcatgatggcgcctactaatgtgagctaggcaagccaatccttaacaacttacttcattaacaaatcacttattttaacgattatcagtgatagcatgaaaacatcagaatttagtaaatgtacggaagacttaaattaaagaaactgaacaataatacggaaatcaacatatgcctctacccaagaactggtgtcacatagttggtatcagagctctaggttacataggtctcacaactcacggacaagctcagtagagtctgagggatcggtacggagacgtctgtatttatcccccagaggctacagagttaggaaaatctcacatttgttctttcttgtcgtgcggatttgttcctcaaatgctaattggatttctactctgttctttcgcagatggcgagaacacgcgcttcctcatctaccgctcagcagcccgagcccccagcagcagctcccactaggggcagagggcgaggccgtgctagaggccgaggtaggggcagagttcagccccgagcagcagcaccagtggcggagcctcaggttgattttgaggaggaggttccggccccagcagttccggtgggcccagctcaggtcccagaggggtttattgctaccccagttcttcaggacgctctggtccgattggtgggcctcatggagagtgtcacccgagcaggtttgcttcctgtagcaccagccacttctcaggctggaggaggggctcagactcctgctacacgcactccggagcaggtagctcctcagattcagactccagcggttcagccagttggagcagttcagccgggtgtagtagctcagaccggtgatggagcggctatgtctgccgatgctttgtggaggctggataggttcaccaagctcttcactactactttcagcggtgcttcttctgaggatccccaggattttctatatagctgcacgaggttctcaggaacatgggtattgttgagaccaatggggtcgattttgctacatttcgcttgtctggatccgccaagacttggtggagggattattgcttagctaggccagccgggtcgccatctttgacttgggagcagtttacagtattgtttctggagaagtttctccccgttactcagagagaggcctatcggaggcagtttgagcgcctccagcagggttccatgacggtcacccagtatgagaccaggttcatcgacttagctcgccatgctcttgtcatacttcctaccgagagagagagggtgaggaggtttatcgacggtcttattcagccgattcgtcttcagatggccaaggaggccgggagtgagatcacttttcaggaggcggccaatgtggcccgcagagttgagatggttctgtcgtagggaggtggtcaggggtcggataagaggccccgtcattcaggcagattcagtggtacctcgtctggaggtagagattcatatggtagaggccatcctcctaggccctttcagtcagctcttcaggttttcacggtgcttcaggtggtcgtggtcctccgattcagtattctgatcagcagtccttcagtgcaccaccagcacctatcagtgcaccgccgcttcagagttttcagggtcgtcagccccagcagccgagggcttgttttacttgtggcgacacgaggcacattgctaggtattgccctcgagcttcgagcagttctccgcatcagggttcccgtgctatggttcaggcaccagatgttccacagcccgcccagccagctagagctagaggtggaggtagaggtcctagaggtggagctcaggccgccagaggtggaggccagccagcagcaggccgtcccagagaggtagttcagggtggtggggcccagccccgatgttatgctctcccagccaggcccgaggctgaggcttcagatgcagttattacaggtacggttctggtttgtgatagagatgcttcagtgttatttgatccagggtctacatactcgtatgtgtcatcttattttgcaccgtatctggtcatgcctagtgattcgttgagtattcctgtttatgtgtctacaccggtgggtgattctattgtggtagatcgagtccatcgctcttgtgtagttgtgattgggggtcttgagactcgtgtggatttgttgcttctagacatggtcgatttcgatgtcatattggggatggactggttatcaccttaccacgctatcttggactgtcatgccaagactgtgaccttagctttaccgggtatgcctcgtttagagtggagagggactcctggtcattctacccgtagcgttatttcttatgtgaaggctcggcgtatggtcgagaaggggtgcttggcctatttagcttatgttcgtgattctagtgcggaggtttcctctattgattctgtgcccgtggttcgtgagtttcctgaggtattcccttcagacctgccgggtatgccgcccgacagggatattgacttttgcattgatttggctccgggcactcagcccatttctattccgccgtatcgcatggccccgcctgagttgaaagagttgaaggagcagttgcaggacttgcttgagaagggtttcattagacccagtgtttcgccttggggtgcgccggtgttgtttgttaagaaaaaggatggttcgatgagaatgtgcattgattaccggcagttgaacaaggtcaccatcaagaataagtatccactgccgaggattgatgatttgttcgatcagcttcagggtgccaaggtattttcaaagattgacttgagatctggctaccatcagttgaggattagggcatccgatgtccctaagacagctttccgcactcggtacgggcattatgagttcttggttatgtcatttgggttgacaaatgccccagcagcttttatggatttgatgaaccgagtgttcaggccttatttggactcgttcgtgatagtcttcattgatgatattttgatatattcccgcagccaggaggagcacgagcagcatctcagagtggttcttcagactctgaaggatagtcagttatatgctaagttctcgaagtgtgagttctggttgagttcagttgcattcctgggtcatgttgtatcagcagagggtattcaggttgatccgaagaagattgaggcagtcaagaactggcctagaccagcatcagctacagagattcggagtttcttgggattggcaggctactatcgtcggttcgtggaggggttctcatctattgcagccccgatgaccaggttgacccagaagggtgcccagttcagatggtcggacgagtgtgaggcgagctttcagaagctcaagacagctctgactacggcaccggtgttggttttgcccacaggttcagggccttacacagtttattgtgatgcttccgtattgggcttggtgcagtgttgatgcaggatggcaaggtcattgcctatgcttcgaggcagttgaagattcatgagaagaactatccggtcatgatttagagttggcagccattgttcacgcattgaagatttggaggcattatctgtatggcgtggcatgtgaggtgttcactgatcacaagagtcttcagtatttgttcaagcaaaaggagttgaatttgaggcagaggaggtggttggagttgttgaaggattatgatatcactatcttatatcacccgggaaaggccaatgtggtggccgatgcttgagtagaaagtcagccagtatgggcagtcttgcttatattccggtcggtgagaggccgcttgcttggatgttcaggctttggccaatcgatttgtgaggttggatatttctgagcctagtcgagtattagcttgcacggtcgctcgttcttcattattggagcgtatccgtgatcggcagtttgatgatccccatttgtgtgtccttagagacacggtgcagcgtggaggtgccaagcaggttaccttaggtgatgatggagttttgagattgcagggtcgagtttgtgtgcctaatgtggatgggcttcgagagttgattttagaggaggcccatagttcccggtactctattcatccccgcgaagatgtatcaggatttgcggcagcattattggtggcgtagaatgaagaaggatattgttgcatatgtggctcggtgtttgaattgtcagcaggttaagtatgagcatcagaggcctggtggattgtttcagaggattgagcttcccgagtggaagtgggagcggatcactatggacttcgttactggacttccgctgactcggaagaagttcgacgcagtttgggtcattgttgataggctgaccaagtcagcgcatttcattcctgtggcagtctcctattcatccgagaggttagctgagatctatatccgggagattgttcgtcttcatggtgtgcctgtatctatcatttcggaccgaggtacgcagtttacctcgtttctggagagcagttcagcgagagttgggcaccaggttgagttgagtacaacatttcatcctcagacggacgggcagtccgagcggactattcagatttggaggatatgctccgagcttgtgtcattgactttggaggttcgtgggatcagtttttgcctttagcagagtttgcctacaacaacagctaccagtcgagtatccagatggctccttatgaggctttgtatggtaggcgatgtcgatctccggttggatggtttgagccgggagaggctcggttgttgggtacggatctggttcaggaggccttggacaaggtcaggatcattcaggataggcttcgtacggctcagtccaggcaaaagagttatgcagaccgcaaggttcgagatgtggcttttatggttggtgagcgggtattgctccgagtgtcgcctatgaagggcgtgatgagattcgggaagaagggcaagcttagccctaggttcattggtccatttgagattcttgatcgagtgggagaggtggcttatagacttgcattgccgcctagcttatcagccgtgcatccagtatttcatgtgtccatgcttcggaagtatcacggcgatccatcccacgtgttagatttcagtactgtccagttggacaaggacttgtcttatgaggaggagccggtggctattctagaccggcaggtccgtcagttgagatcgaagagttttccttcggttcgtgttcagtggagaggtcagcctcctgaggcatcgacctgggagtccgagtccgatatgcggagccgttatcctcatttttccccgactcaggtacttccttcttctgtccgttcgaggacgaacggttgttttagaggtggagaatgtgacgacccaaagggtcatcacctgttttcttacccattatgtgcttccgaggccttgaaaacctcatttagagtcgcttcgatttgcgtgcgcagtccgggcgcgtagccggaaagcttaaatatgaaattctgtgaaaaatgttaagtcttgactttaaaatgaataaatttgacttcggtcaacattttgggtaaacggacccggacccgtgatttgacggtcccggagggtccgtaggaaaatatgggacttgggcgtatgcccggaatcgaattccgaggtcccagcccgagaaatgaatttttaagtgaaattgttttcagaaattgtttaaggaaatttgaaatgaaaactgattagaaagcaatggtatcgggcccgtattttggttccggcgcccggtacaggtcttatatatgacttgagtcattcctgtgaaatttggttaaaaacggacgtcgtttgacgtgatccggaccttaattgagaaatttgatgtttaaaagagttttgagaaattttattgatctcgaggtttaattcgatgctcgtgatgttattttggtaatttgattacacgaatatgtccgtaggatgtttttgaggttgtgtgtatacttgggttggagtttcgagggctcgggtgagtttcgagtggttccggaatgccttaggcttagaaagtcagatgttgcaggttcaggaagttgcagtctctgaaccctctagtgcggtccgcgagaaatcgcgtgcgaccgcggaggggccagcgcggccgcggtcgcctttgtgcggtccgcggtggaggctgtgcggccgcagtcgcctttgtgcggtccgcacagggtgctgaactgcaggtcttcagggaggggccagcgcggccgcggtcgcctttgtgcggtcaggctgttccatttgatgcggtccgcactgggggtctgagaggggtataaataaacgggaatttcagttatttttcacttttcaaaaccccaaaacataagaggcgatttttcaaacaacctttcttctccaaaacgttggtaagtgatttctaactcattttcttcactccttaacatcttttaacatgatttcaacttcaaatcaaagattttcatgggggaaattgggtgttttgggtagaacctaaaaattggggatttggacctcaatttgagattcgtgggggaatgggtaatcgggttttggtccgaacctcgggtttcgaccacgtgggcccggggggtgatttctgacttttgggtaaaactttagaaaactcattttcatgcattggggttgattcatttagcacttattgatgtaattaagtaacttgtgactagattcgagcggattggtggtggaatcaaggggtaaagctatagttgagacttgagtggtgatcaaggcatcgaggtaagtgtttggtctaaccctagcttgagggattaggagttgagtcatacttgctacttgcttcttgttgagtacgacgtataggcatggtgacgagtatctatacgttggtgtcaagcatgaccgtgagtcttaaattgaaagttgttgtgttcttaaatgacacttgggtgctttacttaatgatcttctatgattgagcattttcaataattgaactgagtacaagttgagttgagattggttatagctgattctcccttgccgggatgactaattcaatattgttgttcccttgccgggaaaattataacattgttgtgttcccttgccgggaagttattatattatttatgttcccttgccgggatttcttgtgattgtgtgatgaaatgtaaaagggagcgggtggtacgcctaccacaagatataatgaaatgggagcgggtggtacgcctaccacgagatataatgaaatgggagcgggtggtacgcctaccacaagatataatgaaatgggaacgcctatggggagcgggtggtacgcctaccacaagatatactgaaatgggagcgggtggtacgcctaccacaagatatgagaaatgggatcgggttgcacgcctgcaacaagatgaaactgaaagtgaaagttgccttatttctctttatccgtgttagaagttaaattgtagtttccttactattctttgatattctgttttatctgctacccccggagcatgtttcccctttcccagctttgattgcttattacctgtttacttttccgccatatagtatataactgcacaggtttatctggagtctggtcctagcctcgtcactacctcgccggggttcaacttctaagagtactaaatacaaccgtttgaaagaaaaatataaactgtttgtctcgaatacatgagataacagactgaaataaagagagaggagacgccgggcctgcggacgcttgcaaggctaccttggtgtctcactggactgaaagcaggctcccgcgttactgctgctgtccaagacctggatctgtgcaaaagagcacagagtgtagtatcagcacaaccgaccccatgtgctggtaagtgtctggcctaaccccggcgaggtagtgacgaggctaggaccagactccagataaacctgtgcagttatatactatatgacggaaaagtaaacaggtaataagcaatcaaagctggaaaaaggggaaacatgctccgggggtagcagataaaacagaataccaaagaatagtaaggaaactacaatttaacttctaacacggataaagagaaataaggaaactttcactttcagtttcatcttgttgcaggcgtgcaacccgatcccatttctcatatcttgtggtaggcgtatcacccgctccgattttattatatctcatggtaggcgtaccacccactcccatttcattatatcttatggtaggcgtaccacccgctcccatttcattatatctcgtagtaggtgtaccacccgctcccatttcattatatcttgtggtaggcgtaccacccgctcccatttcattatatctcgtggtaggcgtaccacccactcccattccattatatctcgtggtaggcgtaccacccgctcccatttcattatatcttgtggtaggcgtaccacccgctcccatttcattatatctcgtggtaggcgtaccacccactcccattccattatatctcgtggtaggcgtaccacccgctcccatttcattatatcttgtagtaggcgtaccgcccgctcccttttacatttcatcacacaatcacaagaaatcccgacaaggaaacataaataatataataacttcccatcaagggaacacaacaatgttataattttcccggcaagggaacaacaatattgaattagtcatcccggcaagggagaatcagctataccaacctcaactcaacttgtactcagttcaattattgaaaatgctcaatcatagaagatcattaagtaaagcacccaagtgtcatttaagaacacaacaactttcaatttaagactcacggtcatgcttgacaccaacttatagatactcgtcaccatgcctatacgttgtactcaacaagaagcaagtagcaagtatgactcaactcctaatccctcaagctagggttagaccaaacacttacctcgatgccttgatcaccactcaagtctcaactatagctttaccccttgattctaccaccaatccactcgaatctagtcacaagttacttaattacatcaataagtgctaaatgaatcaaccccaatgcatgaaaatgagttttctaaaattttacacaaaagtcagaaatcacccccgggccgacgtggtcgaaacttgaggttcggagcaaaacccgattacccattctctcacgaatccaaatatataatttgttttgaaatcggacctcaaattgaggtctaaatcaacaattttagaaaacctaggttctacccaaaacacccaatttcctccatgaaaatctttgatttgaagttgaaatcatgttaaaagatgttaaggagtgaacaaaatgagttagaaatcacttatcaacgttttggagaagaaaggttatttgaaaaatcgccttttatgttttggggttttgaaaaagtgaaaaaatagctcgtttatttatacccctctcagacccacagtgtggaccgcatcaaatggaccgcggtcgcacagcctctaccgcggaccacacaaaggcgactgcggccgcgctggcccctccctgaagacctgcagttcaacaccctgggcggaccgcacaaaggcgatcacggccgtgctggcccctccgctgtcgcacacaatttctcgcggaccgcactagagggttcagagaatgcaacatttgactttctaagcctaaggcatttcggagcccattcgaaactcacccgagccctcgaaactccaacccaagtatacacacaacctcaaaaatatcctacggatatattcgtgtactcaaatgaccaaaataacatcacaagcattgaattaaacctcgagatcaataaaatttctcaaaactcttttaaacataaaatttctcaattaaggtccggatcacatcaaacgacgtccgttttaaccaaatttcacaagaatgactcaagtcatatataagacctgtaccaagtaccagaaccaaaatacgagcccgataccattgctttctaatcagtttctcacttcaaatttccttaaacaatttctaaaaataatttcacttaaaaattcatttctcgagtaagggaactcggataccgattccgggcatatgtctaagtcccatattttcctacggaccctccgggaccgtcaaatcatgggtccgggtctatttacccaaaatgttgaccgaagtcaaatttattcattttaaagtcaagacttaacatttttcacagaatttaatatttaagctttccggctatgtggctggaatgcacatgcaaatcgaagcaacttcaaatgaggttttcaaggcctcggaagtacataatgggtaagaaaacaggtgatgaccctttgggtcgtcacattctccacctctaaaacaaccgttcgtcctcgaacggacagaagaaggaagtaactgagtcagggaataaatgaggataatggctccacatatcgaactcggactcccaggtcgatgccgtaggaggctgacctctgcactgaacacgaaccgaaggaaaactctacgccctcaactgacggacctgccggtctagaatagccaccggctcctcctcataagacaagtccttgtccaactagacagtactgaaatctaacacgtgggatggatcgctgtgatacttccgaagcatggacacatgaaatactggatgcacggctgatcagttaggcggcaatgcaagtctacaagacacctctcccactcgatcaataatctcaaatggaccaatgaacctagggctaagcttgcctttcttcccgaatctcatcacgcccttcatagacgacactcggagcaatacccgctcaccaaccataaaagtcacatctcgaactttgcggtctgcataactcttttgcctggactgagtcgtacgaagcctctcctgaatgatcatgaccttgtccatggcctcctgaaccagatccgtacctaacaaccgagcctcccctggctcaaaccatccaacaggagatcgacatcgcctaccatacaaagcatcataaggagccatttggatactcgactggtagctgttgttgtaggcaaactctgctaaaggaaaaaactgatcccacgaacctccaaaatcaatgacacaagctcggagcatatcctctagaatctgaatagtccgctcggactggccgtctatctggggatgaaagcctgtactcaactccacctaagttcccaactctcgctgaactgctctccagaaatgcgaggtaaactgcgtacctcggtccgaaatgatagatacaagcacaccatgaaggcgaacaatctcccgaatatagatctcagctaacctcttggatgaataggagaccaccacatgaatgaaatgcgctgacttggtcagcctatcaacaatgacccaaactgcgtcgaacttcttccgagtcagcgaaagtctagtaacgaagtccatagtgatccgctcccacttccactcgggaagctcaatcctctgaaacaatccaccaggtctcttatgctcatacttaacctgcttaaaattcaaacattgagccacatatgcaacaatatccttcttcattctacgccaccaataatgtcgccgcaaatcctgatatatcttcgcggcgcctggatgaatagagtactaggaactataggcctcctttaaaatcaactctcgaagcccatccacattaggcacacaaactcgcccctgcaatctcaaaacttcatcatcacctaaagtaacctgcttggaacctccatgctgcaccgtgtctctaaggacacacaaatggggatcatcaaactgtcgatcacggatacgctccaataatgaagatcgagtgaccgtgcaagctaatattcggctaggctcaaagatatccaatctcacaaatcgattggccaaagcctgaacatccaacgcaagcggcctctcaccgaccgaaatataggcaagactgcccatgctggctgactttctactcagagcatcggccaccacgttggcctttcccaggtgatataagatagtgatatcataatccttcaacaactccaatcatctcctctgcctcaaattcaactccttttgcttgaacaaatactgaaaactcttgtgatcagtgaacacctcacatgtcacgccatacagataatgcctccaaatcttcaatgcgtgaataatggctgccaactctaaatcatggaccagatatttcttctcatgaatctttaactgccttgaatcataggcaatgaccttgccatcctgtatcaacactgcaccaagcccaatacgggaagcatcgcaataaactatgtaaggccctgaacttgtgggcaaaaccaacactggtgcggtagtcagagttgtcttgagcttctgaaagctcgcctcacactcgtccgaccatctgaatttggcacccttctggttcaacctgatcatcggggctgcaatagatgagaacccctccacaaaccgatgatagtagcctgccaatcccaagaaactctgaatctctatagctgatgttagtctaggatagttcttgactgcctcaatctttttcggatcaacctgaataccctctgattatacaacatgacctagaaatgcaactgaactcagccagaactcacacttcaagaacttagcatataactgactatccttcagagtctgaagaaccactctgagatgctgctcgtgctcctcctggctgcgggaatatatcaaaatatcatcaatgaagactatcacgaacgagtccaaataaggcctgaacactcggttcatcaaatccataaaagtcgctggggaatttgtcaacccaaatgacatgaccaagaactcataatgcctgtaccgagtgcggaaagctatcttaaggacattggatgccctaatcctcaactgatggtatccagatctcaagtcgatctttgaaaataccttggcaccctgaagctgatcgaacaaatcatcgatcctcggcagtggatacttattcttgatggtgaccttgttcaactgccgataatcaatgcacattctcatcgaaccatccttttcttaacaaacaacaccggcgcaccccaaggcgaaacactgggtctaatgaaacccttctcaagcgagtcctgcaactactccttcaactctttcaactcaggcaggtccatgcgatacgacagaatagaaatgagctgagtgcccgaagccaaatcaatgcaaaagtcaatatccttgtcgggcggcatacccggcaggtctgaagggaaaacctcaggaaactcacgaaccacgggacaaaatcaatagaggaaacctccgcactataatcttgaacataagctaaataggccaagcaccccttctcgaccatatgccgagccttcacataagaaatgacgctacatgtagaatgactaggagtccctcttcactctaaacgaggcatacccggtaaagctaaggtcacaatcttggtgtcacagtccaagatagtgtagtaaggtgatagccagtccatccctaatatgacatcgaaatcgaccatgtctagaagcaataaatccacgtgagtcttaagacccctaatctcaactcacaagagcgatagactcgatctaccacaatagaatcacccactggcatagacacataaataggaatactcaacgaatcactaggcatgactagatacggtgcaaaataagatgacacatacgagtatgtagaccctgtatcaaataacactgaagcatctctatcacaaaccagaaccgtacctgtaataactgcatctgaagcctcagcctcgggcttggctgggagagcataacatcggggctgggccccccaccttgaactacctctctaggatggcctgctactggctggcctctacctctggcggccagagctccacttctaggacctctaactccacctctaacacctctacccccacctctagctatctgggcgggctgtggaacatctagtgcctaaaccatagcacgagaaccctgatgcggagaactgctcgaagcccaagggaaataccttacaatgtgcctcgtgtcgccacaagtaaaataagccctcggctgctggggctgacgaccctaagaactctgaagcggtggtgcactgataggtgctggtggtgcactgaaggactactgatcagaatactgaatcggaggaccacgaccacctgaagcaccgtgaaaagcctgaagagccaactagaagggactaggaggatggcctctaccatatgaatccctaccaccagacgaggtaccactgaatctgcctgaatgatggggcctcttatctgacccctgaccaccttctgcgacagaaccatctcagctctgcgggccacattggccacctcctgaaaagtgatctcactcccggcctccttggccatctgaagatgaatcggctgaataagaccgtcgataaacctcnnnnnnnnnnnnnnnnnnnnnnnnnnnnnnnnnnnnnnnnnnnnnnnnnnnnnnnnnnnnnnnnnnnnnnnnnnnnnnnnnnnnnnnnnnnnnnnnnnnnnnnnnnnnnnnnnnntaagagcatggcgagctaagttgatgaacctggtcttatactgggtgaccgtcatggaactcgaactgcctccgataggcctctctctgagtaacggggagaaaattctccagaaacaatactgtaaactgctcctaagtcaaagatggcgacccagctggcctagctaagcaataatccctccaccaagtcttggcggatccagacaagcagaatgtagcaaaatcgacctcaacaatacccatgttcctaagaacctcgtgacagctatatagaaaatcctggggatcctcagaagaagcaccactgaaagtagtagtgaagagcttggtgannnnnnnnnnnnnnnnnnnnnnnnnnnnnnnnnnnnnnnnnnnnnnnnnnnnnnnnnnnnnnnnnnnnnnnnnnnnntacatacatagccgctccatcaccggtctgagatactacacccggttggactactccaactggccgaaccgctggagtctgaatctgaggagctacctgctctggagtgcgtatagtaggtgtctgagcccctcctccagcctgagaagtggctggggctacaggaagcaaacttgctcgggtgacactctccgttaggcccaccaatcggaccagagcatcctgaagaactagggtagcaataaacccctctgggacctgagctgggcccaccggaactgctggggccagaacctcattctcaaaattctcgggactaaactctgcccctacctcggcctctagcatggcctcggcctctagcacggcctcggcctctgcccctagtgcgagcttctgctgggggctcgggttgctgagcggtagataaggaagcgcgtgttcttgccatctgcgagagaacagagtagaaatccaattagcatttgaggaacaaatccgcacgacaagaaagaacaaatttgagattttcctaactctgtagcctctgggggataaatacaaacgtctccgtaccgatccctcagactctactgagcttgtctgtgagttgtgagacctatgtaacctagagctctgctaccaatttgtcacgacccggacttcccacccccgggagtcgtgatggcgcctactaatgctagctaggtaagccaatccttaacaacttacttcattaacaaatcacttcttttaacgacaatcagtgatagcatgaaaacaccagaatttagtaaatgtacggaagacttaaattaaagaaactgaacaataatacggaaatcaacatatgcctctacccaagaactggtgtcacatnnnnnnnnnnnnnnnnnnnnnnnnnnnnnnnnnnnnnnnnnnnnnnnnnnnnnnnnnnnnnnnnnnncgaacttctaagagtactaaatacaaccgtttgaaagaaaaatataaattgtttgtctcgaatacatgtgataacagactgaaataaaaagagaggcgatgttgggcctgcgaacgcgtgcaagactacctcggtgtctcactggactgaatgctggctcccgtactactgcttctgtccaagacctggatctgtgcaaaagagcacaaagtgtagtatcagcaaaaccgaccccatgtgctggtaagtgtctagcctaaccccggtgaggtagtgacgaggctaggaccagactacaaataaacctatgtagttatatactatatggcagaaaagtaaacatgtaataagcaatcgaagctaggaaaggggaaacatgctccgggggtagcaaataaaacagaataccaaagaatagtaaggaaactacaatttaaacttctaacacggataaagagaaataaagcaactttcactttcagtttcatcttgttgcaggcgtgcaacccgatcccatttctcatatcttgtggtaggcgtaccacccgctcccattcttcagtagtgagacaccgaggtagccttgcaagcgtccgcaggcccggcgtctcctctatctttatttcagtctgttatctcatgtattcgagacaaacagtttatatttttctttcaaacggttgtatttagtactcttagaagttcgtgagtaatgtgacaccagttcttgggtagaggcatatgttgatttccgtattattgttcagtttctttaatttaagtcttccgttatttattaaattccgttgttttcatgctatcactgataatcgttaaaagaagtgatttgttaatgaagtaagctgttaaggattggcttgcctagctcacattagtaggcgccatcacgactcccgagggtgggaaatccgggtcgtgacaagttggtatcagagctctaggttacataggtctcacaactcacggacaagctcagtagagtctgagggatcggtacggagacgtctgtatttatccccagaggctacagagttaggaaaatctcacatttgttctttcttgtcgtgcggatttgttcctcaaatgctaattggatttctactctgttctttcgcagatggcgagaacacgcgcttcctcatctaccgctcagcagcccgagcccccagcagcagctcccactaggggcagaggccgaggccgtgctagaggccgaggtaggggcagagttcagccccgagcagcagcaccagtggcggagcctcaggttgattttgaggaggaggttccggccccagcagttccggtgggcccagctcaggtcccagaggggtttattgctaccccagttcttcaggacgctctggtccgattggtgggcctcatggagagtgtcacccgagcaggtttgcttcctgtagcaccagccacttctcaggctggaggaggggctcagactcctgctacacgcactccggagcaggtagctcctcagattcagactccagcggttcagccagttggagcagttcagccgggtgtagtagctcagaccggtgatggagcggctatgtctgccgatgctttgtggaggctggataggttcaccaagctcttcactactactttcagcggtgcttcttctgaggatccccaggattttctatatagctgtcacgaggttctcaggaacatgggtattgttgagaccaatggggtcgattttgctacattccgcttgtctggatccgccaagacttggtggagggattattgcttagctaggccagcgggtcgccatctttgacttgggagcagtttacagtattgtttctggagaagtttctccccgttactcagagagaggcctatcggaggcagtttgagcgcctccagcagggttccatgacggtcacccagtatgagaccaggttcatcgacttagctcgccatgctcttgtcatacttcctaccgagagagagagggtgaggaggtttatcgacggtcttattcagccgattcgtcttcagatggccaaggaggccgggagtgagatcacttttcaggaggcggccaatgtggcccgcagagttgagatggttctgtcgcagggaggtggtcaggggtcggataagaggccccgtcattcaggcagattcagtggtacctcgtctggaggtagagattcatatggtagaggccatcctcctaggccctttcagtcagctcttcaggcttttcacggtgcttcaggtggccgtggtcctccgattcagtattctgatcagcagtccttcagtgcaccaccagcacctatcagtgcaccgccgcttcagagttttcagggtcgtcagccccagcagccgagggcttgttttacttgtggcgacacgaggcacattgctaggtattgccctcgagcttcgagcagttctccgcatcagggttcccgtgctatggttcaggcaccagatgttccacagcccgcccagccagctagaggtgggggtagaggtgctagaggtggaggtagaggtcctagaggtggagctcaggccgccagaggtggaggccagccagcagcaggccgtcccagagaggtagttcagggtggtggggcccagccccgatgttatgctctcccagccaggcccgaggctgaggcttcagatgcagttattacaggtacggttctggtttgtgatagagatgcttcagtgttatttgatccagggtctacatactcgtatgtgtcatcttattttgcaccgtatctggtcatgcctagtgattcgttgagtattcctgtttatgtgtctacaccggtgggtgattctattgtggtagatcgagtccatcgctcttgtgtagttgtgattgggggtcttgagactcgtgtggatttgttgcttctagacatggtcgatttcgatgtcatattggggatggactggttatcaccttaccacgctatcttggactgtcatgccaagactgtgaccttagctttaccgggtatgcctcgtttagagtggagagggactcctggtcattctacccgtagcgtgtgtaggtgcttggcctatttagcttatgttcgtgattctagtgcggaggtttcctctattgattctgtgcccgtggttcgtgagtttcctgaggtattcccttcagacctgccgggtatgccgcccgacagggatattgacttttgcattgatttggctccgggcactcagcccatttctattccgccgtatcgcatggccccgcctgagttgaaagagttgaaggagcagttgcaggacttgcttgagaagggtttcattagacccagtgtttcgccttggggtgcgccggtgttgtttgttaagaaaaaggatggttcgatgagaatgtgcattgattaccggcagttgaacaaggtcaccatcaagaataagtatccactgccgaggattgatgatttgttcgatcagcttcagggtgccaaggtattttcaaagattgacttgagatctggctaccatcagttgaggattagggcatccgatgtccctaagacagctttccgcactcggtacgggcattatgagttcttggttatgtcattttgggttgacaaatgccccaacagcttttatggatttgatgaaccgagtgttcaggccttatttggactcgttcgtgatagtcttcattgatgatattttgatatattcccgcagccaggaggagcacgagcagcatctcagagtggttcttcagactctgaaggatagtcagttatatgctaagttctcgaagtgtgagttctggttgagttcagttgcatttctgggtcatgttgtatcagcagagggtattcaggttgatccgaagaagattgaggcagtcaagaactggcctagaccagcatcagctacagagattcggagtttcttgggattggcaggctactatcgtcggttcgtggaggggttctcatctattgcagccccgatgaccaggttgacccagaagggtgcccagttcagatggtcggacgagtgtgaggcgagctttcagaagctcaagacagctctgactacggcaccggtgttggttttgcccacaggttcagggccttacacagtttattgtgatgcttctcgtattgggcttggtgcagtgttgatgcaggatggcaaggtcattgcctatgcttcgaggcagttgaagattcatgagaagaactatccggtcatgatttagagttggcagccattgttcacgcattgaagatttggaggcattatctgtatggcgtggcatgtgaggtgttcactgatcacaagagtcttcagtatttgttcaagcaaaaggagttgaatttgaggcagaggaggtggttggagttgttgaaggattatgatatcactatcttatatcaccgggaaaggccaatgtggtggccgatgcttgagtagaaagtcagccagtatgggcagtcttgcttatattccggtcggtgagaggccgcttgctttggatgttcaggctttggccaatcgatttgtgaggttggatatttctgagcctagtcgagtattagcttgcacggtcgctcgttcttcattattggagcgtatccgtgatcggcagtttgatgatccccatttgtgtgtccttagagacacggtgcagcgtggaggtgccaagcaggttaccttaggtgatgatggagttttgagattgcagggtcgagtttgtgtgcctaatgtggatgggcttcgagagttgattttagaggaggcccatagttcccggtactctattcatccgggcgccgcgaagatgtatcaggatttgcggcagcattattggtggcgtagaatgaagaaggatattgttgcatatgtggctcgatgtttgaattgtcagcaggttaagtatgagcatcagaggcctggtggattgtttcagaggattgagcttcccgagtggaagtgggagcggatcactatggacttcgttactggacttccgctgactcggaagaagttcgacgcagtttgggtcattgttgataggctgaccaagtcagcgcatttcattcctgtggcagtctcctattcatccgagaggttagctgagatctatatccgggagattgttcgccttcatggtgtgcctgtatctatcatttcggaccgaggtacgcagtttacctcgcgtttctggagagcagttcagcgagagttgggcaccaggttgagttgagtacaacatttcatcctcagacggacgggcagtccgagcggactattcagatttggaggatatgctccgagcttgtgtcattgactttggaggttcgtgggatcagtttttgcctttagcagagtttgcctacaacaacagctaccagtcgagtatccagatggctccttatgaggctttgtatggtaggcgatgtcgatctccggttggatggtttgagccgggagaggctcggttgttgggtacggatctggaggccttggacaaggtcaggatcattcaggagaggcttcgtacggctcagtccaggcaaaagagttatgcagaccgcaaagttcgagatgtggcttttatggttggtgagcgggtattgctccgagtgtcgcctatgaagggcgtgatgagattcgggaagaagggcaagcttagccctaggttcattggtccatttgagattcttgatcgagtgggagaggtggcttatagacttgcattgccgcctagcttatcagccgtgcatccagtatttcatgtgtccatgcttcggaagtatcacggcgatccatcccacgtgttagatttcagtactgtccagttggacaaggacttgtcttatgaggaggagccgtggctattctagaccggcaggtcgtcagttgagatcgaagagttttccttcggttcgtgttcagtggagaggtcagcctcctgaggcatcgacctgggagtccgagttcgatatgcggagccgttatcctcatttattccccgactcaggtacttccttcttctgtccgttcgaggacgaacggttgttttagaggtggagaatgtgacgacccaaagggtcatcacctgttttcttacccattatgtgcttccgaggccttgaaaacctcatttagagtcgcttcgatttgcgtgcgcagtccgggcgcgtagccggaaagcttaaatatgaaattctgtgaaaaatgttaagtcttgactttaaaatgaataaatttgacttcggtcaatattttgggtaaacggacccggacccgtgacgggtccgtaggaaaatatgggacttgggcgtatgcccggaatcggaatccgaggtccctagcccgagaaatgaatttttaagtgaaattgttttcagaaattgtttaaggaaatttgaatgaaaactgattagaaagcaatggtatcgggcccgtattttggttccggcgcccggtacaggtcttatatatgacttgagtcattcctgtgaaatttggttaaaaacggacgtcgtttgacgtgatccggaccttaattgagaaatttgatgtttaaaagagttttgagaaattttattgatctcgaggtttaattcgatgctcgtgatgttattttggtaatttgattacacgaatatgtccgtaggatgtttttgaggttgtgtgtatacttgggttggagtttcgagggctcgggtgagtttcgagtaggttccggatgccttaggcttagaaagtcagatgttgcaggttcaggaagttgcagtctctgaaccctctagtgcggtccgcgagaaatcgcgtgcgaccgcggaggggccagcgcggccgcggtcgcctttgtgcggtccgcggtggaggctgtgcggccgcagtcgcctttgtgcggtccgcacagggtgctgaactgcaggtcttcagggaggggccagcgcggccgcggtcgcctttgtgcggtccgcggtggaggctgtgcggccgcggtccatttgatgcggtccgcactgggggtctgagaggggtataaataaacgggaatttcagttatttttcacttttcaaaaccccaaaacataagaggcgatttttcaaacaacctttcttctccaaaacgttggtaagtgatttctaactcattttcttcactccttaacatcttttaacatgatttcaacttcaaatcaaagattttcatgggggaaattgggtgttttgggtagaacctaggttttctaaaattggggatttggacctcaatttgaggtccgatttcaaaacaaattatatatttggattcgtgggggaatgggtaatcgggttttggtccgaacctcgggtttcgaccacgtgggcccgggggtgatttctgacttttgggtaaaactttagaaaactcattttcatgcattggggttgattcatttagcacttattgatgtaattaagtaacttgtgactagattcgagcggattggtggtggaatcaaggggtaaagctatagttgagacttgagtggtgatcaaggcatcgaggtaagtgtttggtctaaccctagcttgagggattaggagttgagtcatacttgctacttgcttcttgttgagtacgacgtataggcatggtgacgagtatctatacgttggtgtcaagcatgaccgtgagtcttaaattgaaagttgttgtgttcttaaatgacacttgggtgccgtggttggcgtaccacccgctccaatttgattatatctcgtggcaggcgtaccacccgctcccatttcattatatctcgtggtaggcgtagcacccgctcccattttattatatctcgtggtaggcgtaccacccgctcccatttcattatatctcgtggtaggtgtaccacccgctcccgtttatatttaatcacacaatcacaagaaatcccggcaagggaacataaataatataataacttcccggcaagggatcacaacgatgttataattttctcggcaagggaacaacaatattgaattagtcatcgaggcaagggagaatcagctataaccaacctcaactcaacttgtactcagttcaattattgaaaatgctcaatcatagaagatcattaagtaaagcacccaagtgtcatttaagaacacaacaactttcaatttaagactcacggtcatgcttgacaccaacgtatagatactcgtcaccatgcctatacgtcgtactcaacaagaagcaagtagcaagtatgactcaactcctaatccctcaagctagggttagaccaaacacttacctcgatgccttgatcaccactcaagtctcaactatagctttaccctttgattccaccactaatccgctcgaatctagtcacaagttacttaattacattaataagtactaaatgaatcaaccccaatgcatgaaaatgagttctctaaagttttacccaaaagccagaaatcacccccggggctcacgtggtcgaaactcgagtttcagaccaaaacccgattacccattcccctacgaatccaaatatataatttgttttaaaatcggacctcaaattgaggtccaaatccccaattttagaaaacctaggttctacccaaaacacccaatttcacccatgaaaatctttgatttgaagttgaaatcatgttaaaagatgttaatgagtgaagaatataagttagaaatcacttaccaatgttttggataagaaaggttgtttgaaaactcgcctcttatgttttggggttttgaagaagtgaaaaaataactgaaattctcgttatttatacccctctcataccccagtgaggaccacaacaaatggaccgcggccgcatagcctccaccgcggaacgcacaaaggcaaccgcggccgcgctggcccctccgcggtcgtacgcgatttcttgcggaccgcactagagggttcagagactgcaacttcctgaacctgcaacatctgactttctaagcctaaggcatttcgaagctcgctcgaaactcacccgagccctcgaaactccaacccaagtatatacacagtctcaaaaatatcctacagacatattcgtgtactcaaatggccaaaataacatcacaagcatcgaattaaacctcgagatcaaaaaaaattctcaaaactcttttaaacgtcaaatttctcaattaaggttcggatcatatcaaacgacgttcgtttttaaccaaatttcacaggaatgactcaagtcatatataagacttgtaccgggcgccggaaccaaaataagggcccgatactattgctttctaatcagtttctcactttaaatttccttaaacaatttcacttagaaattcatttctcgggctaaggacctcaaattctgatttcgggcatacgcccaagttccatattttcctacggactctccgggaccgtcaaatcacgggtttgggttcgtttaccctaaatgttaaccgaaatcaaatttattcattttaaagtcaaaacttaatatttttcatagaatttcatatttaagatttccagctacgtgcccggactatgcacacaaatcgaagcaactctaaatgtggttttcaaggcctcagaagcacataatgggtaagaaaacaggtgatgaccatttgggtcgtcacatccacccaaaccctaattcatgcctataaataaggctacatatgttcttcaaagatagtccaacagttccataaactctcaaaatatgcataaagagatcaaatatacgatctccaaaatccccaaaaattcttggaatattcaataagagatcaaagacatgccaaatatgtcttgctcaaatttctatcaacattcaagatccaaacagattgctgctacatgcttcttgatcatcaaatacatcaaggagatgcataccattacgttcgagaaatacacttctaaggccctagaatcacgtagaataaatcggaggaaagaatcaagggataaacagagttgtaacctaaaatgtttatcaataaaatccttttttctttatagttgtttgtgattgcagttttatttttctctgcataaatttgttgcaaacaaattggcacgcatagtgggaccagctctgtcctccatctcttccttctgcaaatcgaatgtcgcgccccctttttccccttcatgggaaaaatccgggttctaacgttcatgggggtaataacttatttccttttgggaatttgggtattaaagagtcgccacctaacggattatagtgcgttagggcacctagagcgattaactcttggattggtttgcattactagagatttagggtaagggctcgagataacctagaagagaaggtgttaggcacccctcttagtccacaacggtgggtcccgcccgaacatatatttacgaacaagtccattaacagataaatagttttaaacacataattacaaataagagcaggttttagacattacatgactcaaataatgacacaaaggaaaggcttaaacaaattgtatacatatggaaagtaaaggtaatttgggaaggaggggtcctagtttggttagactacaggatcaccccatgtaatgtctggtaaacactcctcaatgaggggctacatatgacattagcgcgtagtcatcatatccctttctacccaagtccctccccttggtcatagcctaaacctctctagcaactttgacaatatcctatgcgtgcactacccgttccttcttcgtggccctggaggtattttaggacctctattctttagacagttctcgacttttctaagtttttaaaggataaaaatctaggcgtcaattaagaatagtttggactgcatttaaagaaataagttataggctcatagttacctcctcaaacataacaagtaagtgcacgtcttcaaagaacattcaaatacttaagagaaaaccctagcacatgatatctaggtgagcaggggttatatagcgttgaattaggacaatatgtgaaagatcctatttatcttgcctattgatttgaacttgttaaatttgaacagctttaagtagcaaaaaaatagttccagagttgcagaatttaaaacgccctataggcttgcctaaatgtagaatagtgatgtcttaagagcaagataactacgttgatgtagtaaatcagtgaacagttttaaacggacacttgagatcctataggcatgctttctagcagtagtgagttaaggcagtgttttaaaaactcaattaaagaagtggatagttgattaagccaatttcaaagtgaactaacatgaattannnnnnnnnnnnnnnnnnnnnnnnnnnnnnnnnnnnnnnnnnnnnnnnnnnnnnnnnnnnnnnnnnnnnnnnnnnnnnnnnnnnnnnnnnnnnnnnnnnnnnnnnnnnnnnnnnnnnnnnnnnnnnnnnnnnnnnnnnnnnnnnnnnnnnnnnnnnnnnnnnnnnnnnnnnnnnnnnnnnnnnnnnnnnnnnnnnnnnnnnnnnnnnnnnnnnnnnnnnnnnnnnnnnnnnnnnnnnnnnnnnnnnnnnnnnnnnnnnnnnnnnnnnnnnnnnnnnnnnnnnnnnnnnnnnnnnnnnnnnnnnnnnnnnnnnnnnnnnnnnnnnnnnnnnnnnnnnnnnnnnnnnnnnnnnnnnnnnnnnnnnnnnnnnnnnnnnnnnnnnnnnnnnnnnnnnnnnnnnnnnnnnnnnnnnnnnnnnnnnnnnnnnnnnnnnnnnnnnnnnnnnnnnnnnnnnnnnnnnnnnnnnnnnnnnnnnnnnnnnnnnnnnnnnnnnnnnnnnnnnnnnnnnnnnnnnnnnnnnnnnnnnnnnnnnnnnnnnnnnnnnnnnnnnnnnnnnnnnnnnnnnnnnnnnnnnnnnnnnnnnnnnnnnnnnnnnnnnnnnnnnnnnnnnnnnnnnnnnnnnnnnnnnnnnnnnnnnnnnnnnnnnnnnnnnnnnnnnnnnnnnnnnnnnnnnnnnnnnnnnnnnnnnnnnnnnnnnnnnnnnnnnnnnnnnnnnnnnnnnnnnnnnnnnnnnnnnnnnnnnnnnnnnnnnnnnnnnnnnnnnnnnnnnnnnnnnnnnnnnnnnnnnnnnnnnnnnnnnnnnnnnnnnnnnnnnnnnnnnnnnnnnnnnnnnnnnnnnnnnnnnnnnnnnnnnnnnnnnnnnnnnnnnnnnnnnnnnnnnnnnnnnnnnnnnnnnnnnnnnnnnnnnnnnnnnnnnnnnnnnnnnnnnnnnnnnnnnnnnnnnnnnnnnnnnnnnnnnnnnnnnnnnnnnnnnnnnnnnnnnnnnnnnnnnnnnnnnnnnnntcatataggcatgttatctaattgttaagagctgatgttggaacttataggtatgattttagtgagacaaatgtaaacacatgtagtagaaggaattgaactcaatcactttacactctataagcatggtatctaattatgaagttgattttaaacctatagatatggtttctattattgaatccatttaaaccctatagacatgagttctaatatgggaaccttttaaaccatataggcatggtttctagtgtggtaaagcaaatatagcaagtctattaatataatcctataaatatggtatctacccgaattacccctgaaatatgtaactacccacgccttttcactaatcaccccaatgttatttgcaaataattattacagaccagctgaacaaataacataaacaaataaagaaggaaaagaagaagttaactatagggagcctgaagtaggcccaaatgacttcccaagcctccaatagcctcaagtgccaaagtaacatatacaatatcatatctaggtgtgtcaaagttccctaaggaactcaaggatcctgagcagtgctcacacctagacctttctcaacaataactgatttaagtgcagtgtggaaaggccagctctaacatgcaagagttcagagaaatctcatggatctcaaggcagtacacatgccagaggggcaggacctaaatattctagtagtggagagtgcttgacatagaaagagtttggaagatagagaaagaaggtcttaatagcagaaagaacttttatgaaagtcagaacaaagttttaagagtaggaatagtttaagaagacatttaaaataataagaaatcaggttaaagaatatacagcttcagaataaatctcacacaagggatagaggtatgggaacacctagcatacaccttagtggtgtcaatcaagtacagatatggtagttacaaagttaagttgggaacacataggtttaagacacaagcagaattacattagaacaaactgtaccggacaaacatttcatgaaaaacattcaatgtattagaacaagcagggtttggtcatgctaaacagtataaaatcataagcttgaaacatgctttgtaatatagtattctaggcatactgattgcatctaagtagaatagctcataaaactgaaaatcaagattgataaactatagtaacaaagtaaacacatagcttggaatgtgaatttaatcagaacataccagtttaggagagtatgcagaatacagagtaaagataatgccagtagtcagccttagtgtacaaccgactgaactagtaggaattgtaaggaacagaagagagtagatgctttttgagagtataatagtgtagacaaactagagtgccttgttatcgttgttataaactttaaagaagagaaggtttatataggagtcgaaaacttaacaaaatgagataagagattaattgagtagtaaatcagggaagttacccataaatcagcaagatcttcccttaatcaagggactattcaatcaacggtaaacatgccaggtatttaaggacaagaataaagtaaagtcttaggtataaaataggtaattaagggctaggtacataaagttctaattagggaaataattagtaagaatcaagtaataatgcagacaaggtaaggaaaaattaattaaggcaagcaannnnnnnnnnnnnnnnnnnnnnnnnnnnnnnnnnnnnnnnnnnnnnnnnnnnnnnnnnnnnnnnnnnnnnnnnnnnnnnnnnnnnnnnnnnnnnnnnnnnnnnnnnnnnnnnnnnnnnnnnnnnnnnnnnnnnnnnnnnnnnnnnnnnnnnnnnnnnnnnnnnnnnnnnnnnnnnnnnnnnnnnnnnnnnnnnnnnnnnnnnnnnnnnnnnnnnnnnnnnnnnnnnnnnnnnnnnnnnnnnnnnnnnnnnnnnnnnnnnnnnnnnnnnnnnnnnnnnnnnnnnnnnnnnnnnnnnnnnnnnnnnnnnnnnnnnnnnnnnnnnnnnnnnnnnnnnnnnnnnnnnnnnnnnnnnnnnnnnnnnnnnnnnnnnnnnnnnnnnnnnnnnnnnnnnnnnnnnnnnnnnnnnnnnnnnnnnnnnnnnnnnnnnnnnnnnnnnnnnnnnnnnnnnnnnnnnnnnnnnnnnnnnnnnnnnnnnnnnnnnnnnnnnnnnnnnnnnnnnnnnnnnnnnnnnnnnnnnnnnnnnnnnnnnnnnnnnnnnnnnnnnnnnnnnnnnnnnnnnnnnnnnnnnnnnnnnnnnnnnnnnnnnnnnnnnnnnnnnnnnnnnnnnnnnnnnnnnnnnnnnnnnnnnnnnnnnnnnnnnnnnnnnnnnnnnnnnnnnnnnnnnnnnnnnnnnnnnnnnnnnnnnnnnnnnnnnnnnnnnnttaatcaaattgagtaaagaagcaagaatcaaacgtttaaagcaaagtagtcaaataaaactagaaactaagggatttagagtaattaacggttcagaaaatcgtgaaagaagcagcatgcttagcatataaaatgaggtaaggcatgaacagtcaggatttcacacagccttgacaaaacacatggttaaacgacactgattcaaagggaagcatacaaattttgcatgaatggctagtacacacacaagttcataatattagtgaaagtttgaacaatgaagattcaataaaagcatactaggacaagtaaatcatgagaagtcacaagaaactaaggcaagaacacactcagaagtacccatatcagaaacaaaatgaaaaccccaacattagggttttcagtataaacgggctagggttgcagcaattttataaaattagtcaaaaatgtgtgagaatcagaagtttaaacacaaagaatcatcaaacaaagttttaaaagaaatttcaaaaaccctaattttagaaaaggtgaagaaatcacttgaaatcaaacgattttggtagagaatctcaaagatattgtaagacacacaagaaatagactcaaatcgtcctagatctgtacagatctaggagatttagagaggaagttagggtttcgcagaaaaccatatagaggtgaagaaacatactgaaaaaaccatagatcgtggctaacatagaaagatttcactcgaaatcacaccggaatggccaagaacaggcaagagatgaacccaggatgcaagtcggcatggccctggtcccttgagggccttagggattgaaagaatgacatgagagaagccattagaggcctgagagatgatgagaggtcgccagagatagccatagataaggggtcggcgtttggagattagggtttaggttgagagtgttttgagagcaaagaggattttagggcggcggggtgggttgtaaaatgaattaggttggggagggaggggtattggtcggtttaattaggaaagggagaatctgggccgttgatcctttgggccattgatcaaaacaatcaatggccaggatttggccggtattgggtcgggtattttaatcaaaagttgggctaggtaatttagtgtccgatttgggatgaatagggattggggaggggttggaattgggctaaaattgaaatgcaatttggctagattttaaataaaattttaacactatatactttataataaataataaatgatttctgaaaaaaataatttcatgtattaaaatgattaaatagttgtttaatattttaaaaatataaaataccattttatgtattaaaaacgtagttatgctttaatagggctagtattgcaaatatatgcaaattgactttaaaaatgcaaatgcaattataaaaatgtactaaaaatattttaacaatattttggcataaatatagaatttagatggctaaatcaccacaaaaataatttgaaggatgattattggagatttttgactttgtttttatggtatttatgttatgttatggatttaatggtattttatgttgttttattatgagtctattgatagtactaatatagtgnnnnnnnnnnnnnnnnnnnnnnnnnnnnnnnnnnnnnnnnnnnnnnnnnnnnnnnnnnnnnnnnnnnnnnnnnnnnnnnnnnnnnnnnnnnnnnnnnnnnnnnnnnnnnnnnnnnnnnnnnnnnnnnnnnnnnnnnnnnnnnnnnnnnnnnnnnnnnnnnnnnnnnnnnnnnnnnnnnnnnnnnnnnnnnnnnnnnnnnnnnnnnnnnnnnnnnnnnnnnnnnnnnnnnnnnnnnnnnnnnnnnnnnnnnnnnnnnnnnnnnnnnnnnnnnnnnnnnnnnnnnnnnnnnnnnnnnnnnnnnnnnnnnnnnnnnnnnnnnnnnnnnnnnnnnnnnnnnnnnnnnnnnnnnnnnnnnnnnnnnnnnnnnnnnnnnnnngggtagaggtaaggtctgtgtacatattaccctccccagaccccacttgtgggattacaccgggttgttgttgttgttgttgttgattattggagattttatcagtaaaaaggaaggaaataaatcaatttgaagattttaaaaattatagaaaaattataaaaatgcttatgcatgcttatatatgcatatatactattttgaaagtatatttatgtattaaaaaaatatatagggaaaaattcggtatcaacagctgcccctctttaccgaaaaggatgaaagagctttcgggtaaagaaataatagccaattttgaccggacgggatgttttgaaaaacagaggccggactccggtctttgatttgcctacatatccctaattttcaggaatcaggccatgtgtagttctagattcatcggcggaatatgccgatgaaattattgcaagaacggacacgagatgtggaagcagctatggtgagtggttagggttcgggacaattgaaggaactggagcgagatcgctcctactaggatagttgtttcttgctggttacctgcagataaaaatactacaaacctatatttgtgaaaatttaaacatgatgaagatttccttttagaccatgaaggttgtctttggacggttaaagatgatgtccttggaccatgatgtcctgggccatgaattgtttagcgagggattcacagtccatgaaatgatgttctcgggccatggcaatggtgcctccgaaccatgacgcctttgaataatgatatgcaaatttgagggatacttaggccatggcatgaggatgatgccttttagactatgacgcctttggatagattgacgatatttagcccatgatatgcaatagtcatgatgttaacaagacaaggcttagtcttgggaaatggagggcagagcttagcccgattgaaaagcaaataaatagtactagaaatagagcaatattcgtgcaaagagggacaatgcttagtnnnnnnnnnnnnnnnnnnnnnnnnnnnnnnnnnnnnnnnnnnnnnnnnnnnnnnnnnnnnnnnnnnnnnnnnnnnnnnnnnnnnnnnnnnnnnnnnnnnnnnnnnnnnnnnnnnnnnnnnnnnnnnnnnnnnnnnnnnnnnnnnnnnnnnnnnnnnnnnnnnnnnnnnnnnnnnnnnnnnnnnnnnnnnnnnnnnnnnnnnnnnnnnnnnnnnnnnnnnnnnnnnnnnnnnnnnnnnnnnnnnnnnnnnnnnnnnnnnnnnnnnnnnnnnnnnnnnnnnnnnnnnnnnnnnnnnnnnnnnnnnnnnnnnnnnnnnnnnnnnnnnnnnnnnnnnnnnnnnnnnnnnnnnnnnnnnnnnnnnnnnnnnnnnnnnnnnnnnnnnnnnnnnnnnnnnnnnnnnnnnnnnnnnnnnnnnnnnnnnnnnnnnnnnnnnnnnnnnnnnnnnnnnnnnnnnnnnnnnnnnnnnnnnnnnnnnnnnnnnnnnnnnnnnnnnnnnnnnnnnnnnnnnnnnnnnnnnnnnnnnnnnnnnnnnnnnnnnnnnnnnnnnnnnnnnnnnnnnnnnnnnnnnnnnnnnnnnnnnnnnnnnnnnnnnnnnnnnnnnnnnnnnnnnnnnnnnnnnnnnnnnnnnnnnnnnnnnnnnnnnnnnnnnnnnnnnnnnnnnnnnnnnnnnnnnnnnnnnnnnnnnnnnnnnnnnnnnnnnnnnnnnnnnnnnnnnnnnnnnnnnnnnnnnnnnnnnnnnnnnnnnnnnnnnnnnnnnnnnnnnnnnnnnnnnnnnnnnnnnnnnnnnnnnnnnnnnnnnnnnnnnnnnnnnnnnnnnnnnnnnnnnnnnnnnnnnnnnnnnnnnnnnnnnnnnnnnnnnnnnnnnnnnnnnnnnnnnnnnnnnnnnnnnnnnnnnnnnnnnnnnnnnnnnnnnnnnnnnnnnnnnnnnnnnnnnnnnnnnnnnnnnnnnnnncatacagatggggaagcaaggattagcctcatgcagatggaggcagggaatatcctcatgtagagagggaggcaaggattagcctcatgcaaatatggaggcaaggattagccccatgcaggtgtggaggcagggattagcctcatgcagatatgaaggcagggattagcctcatgcaaatagggaggaaaggattagcctcatgaaaatatggaggtagggatcagcctcatgcaaatatggagtcaaggattagcctcatgcagatatggaggtagagattagcctcatgcagatatggaggtagggatttgactcatgcaaatgtggaggcaaggattagcctcatgcaaatagggaagcaaggattagcctcatgcaagtggggagacaaagattagcctcatgcaagatagggaggcagggattagcctcatacacgtatggaggcaaggattagcctcatgcagatatggaggcaggaattagcctcatgcaaatatggaggcaaagattatcctcatgcaagtgtggaggaaaggattagcctcatactaatagggaggcagggattagcctcatgcaagtatggaggcaaggattagcctcatgtagagagcaagtagcaaataagagtagtgtatgtcttagctggagatacattcggtgtctgatgtcttgattgataatgaatttgttacgtgtatgtatttgaggatgttattgccatgctagatatgcctgcattcaaagaaaaattgtaagttttgtgggggaaggttggtttgtgcttctgtcggctggctttgctttgctctatcctgaaagccctttctgagttcccctaggtaacacctgactgttatggaaatagagtttttcgaaaaatattcaatcgttcataaaaatagagttatttcagaaatatattgatatatttagatgaactagtgactgtaacacatctcaaatgcattacaactctcttctattggaattttgagggtccttctcaaaattctgccccagtttagtagatgatccttcggctgtttgcggacaataggccttgctgaaccttcttcggaattttgagaatccttctcaaaaattttgccccagtttcttaactaattattgaccgtctgacacatgtttgcattggctggacttgctccggaattttgaggaccctcttcaaaattctaccacagtttctgatcttggggggaaatgaaaattttattatgatatgatcgaacccataaggctgcctacgtatcccctcttaaatggaaatcaggtcaaacgtagttcaattacattagatgagaaaaatgtaaataatccaagcatcgtatctcttgattgcgtctgaattaattggttttggccaaattgctccatcaatttttgcaagtatgggtgctcctcctgtcagcaccctgtgaaccatatacgaaccttgccagttgagggagaatttcccttttgattcatcttaatgtgggaagatcttctgcagcaccaactgacctggtgtaaattgccttagtttgaccctttagttgaaagctctggacattatgttctgataaatttggccttggcacactgcattcatcctctttccatcgatgaaggccaattgttcatagcgacttcttatctattctgcatcgctgagttcagcttcctatatgactctcaaagaagcaatctctacttcggctgggatgacaacttcggtaccgtaaactagcatgtaggaagttgccctggttaatgtgcgaaccatagtgcgatatcccaataaagcaaatggtagcttttcgtgccactatttgtgattctctaccatcttccttagtatcttcttgatgtttttgttggccgcttctacggctctattcatctgaggtttgtaggttgtggaattcttgtgcttgattttgaaagtttcacccatggcttttatcagatcactattgaggttggcggcattattagtaagaatggactcgggaactcctaatcgacaaacaattcgatccttgacaaaatctacgatgactcttttggttacagctttgtaagatgcaacctctacccattttgtgaagtaatcaatggctactagaataaacctgtgttcgtgtgaagcagtgggctaaatcggaccaataacatccattccccaagcggcgaatggctaatgagagcttgttacattgagctcgtttggcggcacttttatcatatcggcatgcacctggtattgaaagcatttgcggacatactggatgcaatccgtttccatggtcatccaaaagtaaccgaccctaagtatcttcttagccaagacgaaaccattcatgtgcaggccacaagtcccggcatgtacatcctcaagtagcttagaagcttcctttgcatcgacacatcttaggaaacccaaatcaggagttctcctgtacaaatttcctccgccgtggaagaagtgattgtaaaatctctggagtgtgcatttctgagtgtggtttgcgtgctcaagatattctccctttgacaaatacttcttgatgtcatggaaccaaggctttccatctatttcttcttcaacatgagcgcaatatgccgactgattatggatcttcactgggatgggatcaatataatttttatatggatgttgtatcatagatgacaaggtggctactgcatcgacaaactcattctgaattctgggcacatgtcgaaattctatcttcatgaacctctttcttaattcctgcacatggtgcagatatggcaatatcttggaattcttggtggcccactctccttgtacctggtgcataagcaaatctgaatcatcgatcactagcaactcttgaatgttcaagtcgatttccatgtttagccctagtatgcaagtttcatactctgccatgttgttcgtgcagggaaatttgagtttagcagatactggataatgttcacccatttctgataccaaaactgctccaatgcttactcctctaaaatttgcatctccatcaaagaacatcctccaaccgtcgtatgcttcagtaatgtcttctcccacaaatgatacttcttcatcaggaaaatacatcttcaaaggttcgtatgctcctcccaccggatttttagcaaggtgatctgccaatgcttgccctttgaccgccttttgagttacgtagacgatatcgaactcacttaacagtatctgtcatttggccaactttccaatcggcatgggtttctagaatatgtacttcagagggtctatcttagatatgaggtatgtagtgtaggcacagaagtaatgcctcaatttctgagctgtccaggtcaaagcacagaaagtgctttcaagtaaagagtaccgtgcttcataaggtgtgaacttcttactcaggtaatatatggcttgctcctttcttattgtctcgtcatgttgtcctagaacacatccgaaggctccatccaatacagatagatagagtagcaaaggtcgtcctggttctggcgggaccataattggtggtgtggacaggtactccttaatcttgtcaaatgctttctcacaatcctttgtctagcttgtttcggcatcttttctcagcatcttaaagatgggttcacatatgattgtggattgtgatatgaatcgattgatgtagttgagacgtcctacgaagctcattacgtcctttttgctcttaggcggtggtaactcctgaatagccttgaccttagatggatccagctcgatccctcgaggactaacgatgaatcccaataattttcctacgagaaccccgaatgcacactttgcgggattcagtttcaaattgtacctctttagactgccaaagaactttctcaggtccgctatgtgatctgcgaccctatcggatttgataatgacatcatccacatacacctctatttccttgtgtattatatcatggaagatggttgtcatggctctcatgtaagtagccccaacatttttcagaccgaatggcatcatcttgtaacagtatacacccaaaggcataataaaagttgtcttctctgcatcttctttgtgcatccagatctggtgatagcccgcgaaacaatatacaaaggattggagttcatgcttggcacaattatcgatcaggatgtgtatgtttggtagtgggaagtcatccttgagacttgctctgtttaaatcccgatagtcaacacatactctgaccttcccatccttcttcggaataggcacaatgttagctaaccaagttgggtacttaaccaccctgagaactttggctttgatatacttggtaacttccttattgattttcaggctcgtgtctagtttgaactttctgagtttctgctttactggcggacatatgagattagtaggcatcccgtgagtcactatggacgtgctcaaaccagtcatgtcatcatatgaccatgcaaaaatatcctcatactcttttaggaagcaagtgtactcttccttctctgttgttgacagtgaatgctgatgcgagtctccttgacggtcttggcgtctcccaaatttactgctttggtttcatccagattggacttaggcttattctcaaaattttcaacctccctgataatttcctcgggtatctcatcctcttcgtctgaatcactatcctcatgttgcatttcctcattacatgtcacagtcacgggttcatcagaaaaagtaataataatgctgtagaaatgaaagtataaaatagtaatgaataataaagagcaaaagagtttgattaaaactgataaatcatcttgacaagtacggctcgatgaatcaggcatttatttcgaaacaagtaaatcttaaaacaaaattacaggaaatcttagatgcctagaatggctatagaagtaaaaatttgccaagctacccagggactcagcgggctcgagatggtgtggcagtccagttcctgagagcggctcccttctttacagtttgaatggtgaggccttcttcctcctcctcctcctcaattatgcactgcagtctatgtcctcatcctccaagaacaaattcttcaacccagcgagcgcttcctcttctgtagtcccccatatcgtattagcttgatgaaaagcttgttccaaatgtgacactagttgctcgagagggtagtacggtccatgccattaaggcgaccaatttctatgctcctgccatgtgtactagtatccaagcccaaaggtggtaccatgatttttcagctatattggtttggtgataccttagaggttctttcccaatcctttgccgggttcatatccagactaggccaatatgctttctattttactgctccaccatttatccttgtcgatggcattgacccgttcaatgtgatgatatgtttccccttctagccttcttttatgtccaatagccgggatggtttgactagtgtaaatgggctactcccgtcgccgtgaatgatcacctcctgacgattccattttaatttcatagcttgatgcagttaggaaggcacggcatcagaggcatggatccatggtcggcccgacagaagattatatgaggctggtatgtcaagcacctgaaactcgacgtcgaaccgagttggccccatctgcaagcaaagtttgatttccccgatcgtggccctttggaacccatcgaaagctttcacgttcatgcttcctacccgtatttcatggaaacctttgtccaaccttttcagagtgtccaatggacaaatattnnnnnnnnnnnnnnnnnnnnnnnnnnnnnnnnnnnnnnnnnnnnnnnnnnnnnnnnnnnnnnnnnnnnnnnnnnnnnnnnnnnnnnnnnnnnnnnnnnnnnnnnnnnnnnnnnnnnnnnnnnnnnnnnnnnnnnnnnnnnnnnnnnnnnnnnnnnnnnnnnnnnnnnnnnnnnnnnnnnnnnnnnnnnnnnnnnnnnnnnnnnnnnnnnnnnnnnnnnnnnnnnnnnnnnnnnnnnnnnnnnnnnnnnnnnnnnnnnnnnnnnnnnnnnnnnnnnnnnnnnnnnnnnnnnnnnnnnnnnnnnnnnnnnnnnnnnnnnnnnnnnnnnnnnnnnnnnnnnnnnnnnnnnnnnnnnnnnnnnnnnnnnnnnnnnnnnnnnnnnnnnnnnnnnnnnnnnnnnnnnnnnnnnnnnnnnnnnnnnnnnnnnnnnnnnnnnnnnnnnnnnnnnnnnnnnnnnnnnnnnnnnnnnnnnnnnnnnnnnnnnnnnnnnnnnnnnnnnnnnnnnnnnnnnnnnnnnnnnnnnnnnnnnnnnnnnnnnnnnnnnnnnnnnnnnnnnnnnnnnnnnnnnnnnnnnnnnnnnnnnnnnnnnnnnnnnnnnnnnnnnnnnnnnnnnnnnnnnnnnnnnnnnnnnnnnnnnnnnnnnnnnnnnnnnnnnnnnnnnnnnnnnnnnnnnnnnnnnnnnnnnnnnnnnnnnnnnnnnnnnnnnnnnnnnnnnnnnnnnnnnnnnnnnnnnnnnnnnnnnnnnnnnnnnnnnnnnnnnnnnnnnnnnnnnnnnnnnnnnnnnnnnnnnnnnnnnnnnnnnnnnnnnnnnnnnnnnnnnnnnnnnnnnnnnnnnnnnnnnnnnnnnnnnnnnnnnnnnnnnnnnnnnnnnnnnnnnnnnnnnnnnnnnnnnnnnnnnnnnnnnnnnnnnnnnnnnnnnnnnnnnnnnnnnnnnnnnnnnnnnnnnnnnnnnnnnnnnnnnnnnnnnnnnnnnnnnnnnnnnnnnnnnnnnnnnnnnnnnnnnnnnnnnnnnnnnnnnnnnnnnnnnnnnnnnnnnnnnnnnnnnnnnnnnnnnnnnnnnnnnnnnnnnnnnnnnnnnnnnnnnnnnnnnnnnnnnnnnnnnnnnnnnnnnnnnnnnnnnnnnnnnnnnnnnnnnnnnnnnnnnnnnnnnnnnnnnnnnnnnnnnnnnnnnnnnnnnnnnnnnnnnnnnnnnnnnnnnnagtcttgaacctccgtcaaccaagaccctgtcaatgaatttgtcttcaattacactgtaatgtgcaatgccgattgtgatttagcccctcaggtggtagctcatcttcgtggaagataatcttataactttccaatacttgccccaccatgttggccatttctccgccagtgatgttattgggtacataagcctcactcagcactttcattaaagtgttcttacgtgcctctgaattttatgatagtgacaggatagatatctgagctggggttttgttcagatggtcgacgatggaatacttctttgcttgtactttcctccacaggtcattcggcccgatctcaatgataggctacctagtattggtatccttacttgaacctcccaaatgttcaggcatatagccccttccagtcctagtcttcccttgtgcatcatcagattcttctacgttggcgttccctttttgctgagcctcgacaacataatcccagggtattgcttttgattttaatggaggtgtggttgatactgtcatagtaaaaggtgggaccacttctacctcaaagggagcaggggtggccacatgtaaagccacctctacctcaaatggaactgatgcatttatctcaaccttgattggtgactgagtctgtaccacaataggagtaagtgtgactgcaactttaaagtcatagccttctcgaataaacccaatcgatccctcagggtcccattcttcattcgtctttatcacatgtacttcaccgcatctatgatcagggagggggttgtcgcggacattaggtgtgtcttcctttgcgtgtatgaccttgttgccaatcagtgtctggatcttatccttcaatgttcggcacccagcagtggtgtgtcccttcataccagaatggtacgaacaagttttgttcagattgacccattgggatgggttttctaatgccacagtgggaacagaagtggcataacccacagcttgcaacctttcatacaacaggtcgataggctcaacaatggcggtgtaatgtatgggtggcttgcgatcgaaattaggtcttggtctcgaaaagttttggcgagttggaggtgattataaatgggatggttgggagttataagtatggtggaaagtggccgattaggaatatttgggagataagggttgacatgtgggtggcggtgcttggtacgtgggtagaggtgtttaatatgtaagtggagatttcgggccttgggccaccattactgccccaacatttctcttctttgatatgctgcctgattgtaatgccttctttgagggcctgtagcacctcaaaattcattaccatcccactcttgattccttcttcgattctttctccgagtttgatgatatcagagaatttatgatttttgataaccatcaatctttcataatattgcggatcctatgctctaatgaagaatttgttcatctgttcctcgtccaaagctggaactctaacgagtagcatactcacggaaagtctcagtaggtttcttcttaagattctggatgtagaaaacatctggtgcattatctgtattgaacctaaaccgatccatgaaatctgacgccatacttacccaactggatcatttcttgggatcttggctaatgtaccaggacaaacaatccccagtaagactcctcataaagagattcattcggatctttttgtctttccccaccccgacaagtttgtcgcaataagtcctcagatgaactatgggatcacctgtatcgtcaaacatctcaaacttgggaggtttgtatccctctggcagttctacattcggttgtatgcataggtcttcataattcaaaccttctattcctttgccgccttcgacaccttgaactcagcttgtcaacttcttgagttcttcagccatgtttttaatgagcaggtccttttcggaggattctggtgtataagacatgggttggatggagtgaggtacaatttctacgtatatagggttgctttgatgggtgccaggaacttaggcgtagtgatggtcgttggtggagttttggggatggggaatgggttgtggtgtgttttggggagtgtggtaagtggtggttggtgggtactgagttggctgatggtgatgttgtggcggagtcaatattggcaatggattgagattttggggtggagttgcatattgatttggtgcgggaggattttgtggatgttggttttgtgtgttttggggaggtattgggttctttgtgttctgttggttgatgtcggggannnnnnnnnnnnnnnnnnnnnnnnnnnnnnnnnnnnnnnnnnnnnnnnnnnnnnnnnnnnnnnnnnnnnnnnnnnnnnnnnnnnnnnnnnnnnnnnnnnnnnnnnnnnnnnnnnnnnnnnnnnnnnnnnnnnnnnnnnnnnnnnnnnnnnnnnnnnnnnnnnnnnnnnnnnnnnnnnnnnnnnnnnnnnnnnnnnnnnnnnnnnnnnnnnnnnnnnnnnnnnnnnnnnnnnnnnnnnnnnnnnnnnnnnnnnnnnnnnnnnnnnnnnnnnnnnnnnnnnnnnnnnnnnnnnnnnnnnnnnnnnnnnnnnnnnnnnnnnnnnnnnnnnnnnnnnnnnnnnnnnnnnnnnnnnnnnnnnnnnnnnnnnnnnnnnnnnnnnnnnnnnnnnnnnnnnnnnnnnnnnnnnnnnnnnnnnnnnnnnnnnnnnnnnnnnnnnnnnnnnnnnnnnnnnnnnnnnnnnnnnnnnnnnnnnnnnnnnnnnnnnnnnnnnnnnnnnnnnnnnnnnnnnnnnnnnnnnnnnnnnnnnnnnnnnnnnnnnnnnnnnnnnnnnnnnnnnnnnnnnnnnnnnnnnnnnnnnnnnnnnnnnnnnnnnnnnnnnnnnnnnnnnnnnnnnnnnnnnnnnnnnnnnnnnnnnnnnnnnnnnnnnnnnnnnnnnnnnnnnnnnnnnnnnnnnnnnnnnnnnnnnnnnnnnnnnnnnnnnnnnnnnnnnnnnnnnnnnnnnnnnnnnnnnnnnnnnnnnnnnnnnnnnnnnnnnnnnnnnnnnnnnnnnnnnnnnnnnnnnnnnnnnnnnnnnnnnnnnnnnnnnnnnnnnnnnnnnnnnnnnnnnnnnnnnnnnnnnnnnnnnnnnnnnnnnnnnnnnnnnnnnnnnnnnnnnnnnnnnnnnnnnnnnnnnnnnnnnnnnnnnnnnnnnnnnnnnnnnnnnnnnnnnnnnnnnnnnnnnnnnnnnnnnnnnnnnnnnnnnnnnnnnnnnnnnnnnnnnnnnnnnnnnnnnnnnnnnnnnnnnnnnnnnnnnnnnnnnnnnnnnnnnnnnnnnnnnnnnnnnnnnnnnnnnnnnnnnnnnnnnnnnnnnnnnnnnnnnnnnnnnnnnnnnnnnnnnnnnnnnnnnnnnnnnnnnnnnnnnnnnnnnnnnnnnnnnnnnnnnnnnnnnnnnnnnnnnnnnnnnnnnnnnnnnnnnnnnnnnnnnnnnnnnnnnnnnnnnnnnnnnnnnnnnnnnnnnnnnnnnnnnnnnnnnnnnnnnnnnnnnnnnnnnnnnnnnnnnnnnnnnnnnnnnnnnnnnnnnnnnnnnnnnnnnnnnnnnnnnnnnnnnnnnnnnnnnnnnnnnnnnnnnnnnnnnnnnnnnnnnnnnnnnnnnnnnnnnnnnnnnnnnnnnnnnnnnnnnnnnnnnnnnnnnnnnnnnnnnnnnnnnnnnnnnnnnnnnnnncattcaaggtgagtgacaagtttgccaagttgtgaacctactcaagttctccttgcaattccaatatcttttattccaatctcaggactagataatttggggctggagtactacggccatctgaggtttctgcgttctcaacattctcctttcggataccacttaagtcgtccatttttgctttccctctaccctttgtattgcttggaggaggaggaggtggagggcctctagatctagtatgatatgctgatgaggccagtatgagtgaaccaacctaaggagatgggaataattaaaaaaaatatgcaaaaacaaaaaggtaacaagttagtgaggattctgaaatgtttgtagtatttaaacacatattgtggaaatgtaaattcgtgtcctactttggaaacctcattgtgcccgaggtaggcctagtgataaataaatttggagaactttaaatgccaataaatgcttcatttaataatataataatagatgaatcccaaatcgacactaagataataaaaaataagtcactattggcacttggccttattacattttaggaaaatagataaatctagcctatttggtcatagaaggaccttccccagattcaatcttcctgactccatcatatatatcccccagctcgcgcagacccagcagcaagtaggctctgtccagatgttctccttcagcgttctgacaatcctcgattctctttatcactttgcctttcagctctactattcctcgctccacatccagtttcctgttggaagtggctgccatctctttccattcttcaatcatcgtacatttctctcatgtatttcccagtgctcattctcagagtcgtggaccctcttgcgcagcctgttgtatttgacttgagcctcagcttcttcgtttatgatcctattccctcgaccagttcctagcatcaccatccccttcagattgtcctccaaccatgtcgggtagagaggctcacaccccacatgatacctgtctggctcaatgtgttcttttccacaatgattttacaatgccacacgtgctgagcttggcacttataagggacatcgttgttttgaaagtctgccctgaaatgactcatattggcaacccttggtacaacctgtttcctgcctgcttgtcttatacctcggatagggatataagggtatatccctctcaacccgatcagcaccaagtgtggagcgtttctggatctgatgatgaattcgtctgttgggaactattctaacatccattgcacatattcatcagtcagattgtcgaagaactctacccattatttggcactttttggctgagcaaatctgtctggaatgtaagtcatccgcttggggtgatgaaaggcaatatggtcgttccaagcccttcgcgaaaattcttggcagtagtgacccttttgaaaatgttctaacaaccacaattgcagcaacaagttaaaaccctcgaaatgtttggccccttttggcagcactccagagccctgtagatgtcagctatgatcatggggactttagtgtatgtctatctattgatcccttccctcaaaatcttggcaaccatggccaacctagtgtggattctttcccttttcattgggaacactatcaggcccaagaagcatacgatgaacacgaacactctgcggtggatgtggcccagataagtgagagagaactcatcatggtaggtacggtaggacttgctatggccatacctctcatacaaagggtatgtaatattctttcaggcataccaggttagcattattctttaaccccatcatttttaagaaccttttaccggtatggttctccggtaccaataacccgggactatcccaagtcaacccgcaagccctccaatttcttctagaagtggtatcatttctacgttgcgaaaactgaacacagacctctcactgtcccagagcaaagtagtagcctcgatcaacttgttgtttggctcaatgtctagcagggaaggcaagttacccaggtacttccttacatgtttcttgtcacttgaggaannnnnnnnnnnnnnnnnnnnnnnnnnnnnnnnnnnnnnnnnnnnnnnnnnnnnnnnnnnnnnnnnnnnnnnnnnnnnnnnnnnnnnnnnnnnnnnnnnnnnnnnnnnnnnnnnnnnnnnnnnnnnnnnnnnnnnnnnnnnnnnnnnnnnnnnnnnnnnnnnnnnnnnnnnnnnnnnnnnnnnnnnnnnnnnnnnnnnnnnnnnnnnnnnnnnnnnnnnnnnnnnnnnnnnnnnnnnnnnnnnnnnnnnnnnnnnnnnnnnnnnnnnnnnnnnnnnnnnnnnnnnnnnnnnnnnnnnnnnnnnnnnnnnnnnnnnnnnnnnnnnnnnnnnnnnnnnnnnnnnnnnnnnnnnnnnnnnnnnnnnnnnnnnnnnnnnnnnnnnnnnnnnnnnnnnnnnnnnnnnnnnnnnnnnnnnnnnnnnnnnnnnnnnnnnnnnnnnnnnnnnnnnnnnnnnnnnnnnnnnnnnnnnnnnnnnnnnnnnnnnnnnnnnnnnnnnnnnnnnnnnnnnnnnnnnnnnnnnnnnnnnnnnnnnnnnnnnnnnnnnnnnnnnnnnnnnnnnnnnnnnnnnnnnnnnnnnnnnnnnnnnnnnnnnnnnnnnnnnnnnnnnnnnnnnnnnnnnnnnnnnnnnnnnnnnnnnnnnnnnnnnnnnnnnnnnnnnnnnnnnnnnnnnnnnnnnnnnnnnnnnnnnnnnnnnnnnnnnnnnnnnnnnnnnnnnnnnnnnnnnnnnnnnnnnnnnnnnnnnnnnnnnnnnnnnnnnnnnnnnnnnnnnnnnnnnnnnnnnnnnnnnnnnnnnnnnnnnnnnnnnnnnnnnnnnnnnnnnnnnnnnnnnnnnnnnnnnnnnnnnnnnnnnnnnnnnnnnnnnnnnnnnnnnnnnnnnnnnnnnnnnnnnnnnnnnnnnnnnnnnnnnnnnnnnnnnnnnnnnnnnnnnnnnnnnnnnnnnnnnnnnnnnnnnnnnnnnnnnnnnnnnnnnnnnnnnnnnnnnnnnnnnnnnnnnnnnnnnnnnnnnnnnnnnnnnnnnnnnnnnnnnnnnnnnnnnnnnnnnnnnnnnnnnnnnnnnnnnnnnnnnnnnnnnnnnnnnnnnnnnnnnnnnnnnnnnnnnnnnnnnnnnnnnnnnnnnnnnnnnnnnnnnnnnnnnnnnnnnnnnnnnnnnnnnnnnnnnnnnnnnnnnnnnnnnnnnnnnnnnnnntaccaatctagcagcaatggtggaatgttgctaaccatacccaatctggggaccccgtacctcattttctgcaaaacaaaagggttaggcctttatcccccaccagactcgactatttatacattcatgattagcatattggtatttagtttgccaaattaatgcacagatcgtggttgtgtccgttgggattatggaacctccggtggactttggataagtctcttcttaaaggatcattatgtggataacataattgctccgacttggtttgaccataatgcatgcacaattttgatcagagtaaggtaactatggggttttatacttgtaccctcaaacggacaacttgagggggaaacacgcgaaaccgtcgactgcaccgctgatcgattggttttatcacaaataagcctttccgtattcaagggtaataaataggaagagcgcaaccactcattaagcgtcactataggatttgatacgtacgagtggaatatgatgtggagcataatttattcaccaattaatagcataaagtcatgtatttgaacgtaggaaaaataaatacaatatttaaataattgaaaagacagttacagaaaaaagaaaacaaaaagacaagtcagttttaggaataaagaaacataaatgcttaaaataggcaattaaatttaaataaggggaaaaggcttaggatagagcatgcttggactaattcataaaaataggttcgttatggtaagagtctaagatattcccagcagagtcgccatgctgtcgcgctcctttttttcccttcgctggaaaagtccaggttccgacgttcatgaaggtaatgacttatttccttttgggaatttgggtactgaagagtcgccacctaaaggattacggtgcgttaagtcacccagagtgattaactcttggattggtttgcattaccagagatttagggtaagggcttgagataacctagaggggaaggtgttagacacccctcttggtccacaacgatgggtcccagccgaacttatatttacgaactagtccattaacaaataaatagttttaaacacataattacaaataagagcatgtttttggacattacatgactcaaataatgaaacaaaggaaaggcttaaacaaattgtatacatatggaaagtaaagggaatttgggaaggaggggtcctaggttggttagcctacaagatcaacccacacaatgtccgataaatactcctcaatgaggagctacacgtgacattagcgtgtagtcatcatatccctttctacccaagtccctccccttggtcatagcctaaagcgttctagcaactttgacaatgtcctatccgtgcactacccattccttcttcgtagccctggaggtattttaggacctctattctttggacaattctagactttcctaaggttttaaaggataaataagtgcacgtcttcaaacaacattcaaatacataagagaaaaccctagaacatgatatctaggtaagcaggggttatatagcgttgaattaggacaatatgtgaaagaccctatttaacttgcctactgatttgaacctgttaaatctgaatagctttaagtagcaaaaaaatagttttagagttgcagaatttaaaacgccctataggcttgcctaaacgcagaacagtgatgtcctaagagcatgataactacgttgatgtagtaaatcagtgaacagttttaaaaggacacttgatatcctataggcatgctttctagcagtagtgagtgaaggaagtgttttaaaaactcaattaaagaagtggatagttgattaaaacaattttaaagtgaactaacatgaattagactgacttgtgtaactaaattgattttaattctataggcagaatttctgatttatttccaataggcatcgtatctaattgttaagagctgatgttggaacttataggcatgattttagtgagacaaatataagcacatgcagtaccaggaattgaactcaatcactttacactatataggcatggtatctgattatgaagttgattttaaacctatagacatggattctattattgaatccatttaaaccctatagacatgagttctaatatgggaaccttttcaaccctataggcatggtttctagtgtggtaaagcaaacatagcaagtatattaatataatcctataaatatggtatctacacgaatcaccccataaatatgtaactacccaccccttttcagtaatcaccccaatgttgtttacaaataattattacagacaagctgaacaaattacataaaagaactagagttccttgttatcgttgttataatagtgtaatagtgtagatgaactagagtgccttgttatcattgttatgaacttaaaagaagagaaggtttatataggagtcgaaaacttaacaaaatgaggcaagagatcaattgagtagaaaatcagggaagttacccataaatcagcaagatcttcccttaatcgagggacagttcaatcaacggtaaacatgccaggtatttaagaaaaagaataaagtaaagccttaggtatagaataggtaattaacggctaggtacataaagttctaattagggaaataatcagtaagaatcaagtaataatgcagacaaggtaagggaaaattaattaaggcaagcaaatcaatcaaattgagtaaataagcaagaatcacacgtttgaaggaaagtaatcaaattaaaccagaaaataagggattcagagtaatcaaaggttcagaaaatcgtgaaagaagcagtatgcttagcatataaaatgaggtaaggcatgaacagtcaggatttcacacagcctcgacaaaacccatggttaaacgacactgattcaaagagaagcnnnnnnnnnnnnnnnnnnnnnnnnnnnnnnnnnnnnnnnnnnnnnnnnnnnnnnnnnnnnnnnnnnnnattttgcatgaatggctagtacacacacaagttcataatatcagtgaaagtttgaacaaagaagattcaatagaatcatactaggacaagcaaatcatgaaaagtcacaagaaactaaggcaagaacatagtcagaagtacccatatcagaaacaaaatgaaaaaccaccaacattagggtttttagtacaaacgggatagggttacaacaagtttataaaattagtcaaaaatgtgtgagaatcagaagtttaaacacaaagaatcatcaaacaaagttttaaaagaagtttcgaaaaccctaattttagaaaaggtgaagaaatcacttgaagtcaaatgattctggtagataatctcaaggatattgtaaaacacacaagaaacagactcaaatcgtcctagatctgcagatctaggaggtttagagacaaagttagggttttgtagaaaaccatacagaggtgaagaaacatactgaaaacccttagatcgtggctaacatagaacgatttcactcgaaatcacatcggaatggccaagatcaggcaagagatgaaccctagatgcaagtcgacatggctctggtcccttgagggccttagggatggcaagaatgacatgagagaagatgagaggttgccggagatggccatagatggagggtcggcatttggagattagggtttaggttgagagtgttttgagagcatagaggattttagtgcggcggggtgggttgtaaaatgaattaggtttgggggnnnnnnnnnnnnnnnnnnnnnnnnnnnnnnnnnnnnnnnnnnnnnnnnnnnnnnnnnnnnnnnnnnnnnnnnnnnnnnnnnnnnnnnnnnnnnnnnnnnnnnnnnnnnnnnnnnnnnnnnnnnnnnnnnnnnnnnnnnnnnnnnnnnnnnnnnnnnnnnnnnnnnnnnnnnnnnnnnnnnnnnnnnnnnnnnnnnnnnnnnnnnnnnnnnnnnnnnnnnnnnnnnnnnnnnnnnnnnnnnnnnnnnnnnnnnnnnnnnnnnnnnnccggtattgggtcgggtattttaatcaaaaattgggctgggtaatttggggtccggtttgggctgaattgggattagggaggggttggaatttggctaaaattgaaatgcaattaggctagattttaaatagccattttaacactacataatttataataaataataaatgatttctaaaaaaataatttcgtgtattaaaatgatttaaaatataaaagaccattttatgtattaaaaacataattatgctttaataaggctaaaaatattctaataatattttggcataaatatagaatttagatggctaaatcaccataaaaataatttgaaggatgattattggagattttatgagtagaaagggaggaaataaatcaatttgaagcctttaaaaattatagaaaaattataaaaatgcttatgcatgctgatcgtggcctactccgcactactaattatttagcgagagagggtcaagatcgatatccacagagagctagaattggaattgagtgtctatttagcctatgattgcttagcgttccaaattgcacttctcataatttttagggttttcttttataattctacttttaacaaactacaaattgtaacttaagctaagagttaaatgctatgggttgttcaaatattctaaaagctttagggtagtggcatccacctaggtggtcaattgacgggtacttgaaactaaggctctattgacattattggggagtatgatataagagttgcactgctttacccactctacacctctcggtggctcaagtgattttgcccaattggctttctcaataccaatgggtatgcaaatttgctcaagcaacttagggttcaagtcgggtattactctctcgaagtttaaccctttaattgggactatcaattctcttgagtccatcccaattccttgttggatcaatttcggagacttaggcactctttttcaagaagagcccaagtcaaattagcacaaactagtgtttgcaaccactaattcagtaattaaaccatgaaattgatccaaataacaaacatccatactcaatatagccgtaaattgcaacactcatcaattgcccacactagggttgagccacaaccctagctaatgggtctagccactcatacttgaagagaaaaacagagaaatagatgaagatgagcacatattaattaattgctaagctaaataaaaagattcaatgataaaaagtaagtaaaaatgcccaaaatggctacaagatacgttcccatgagcgcaacaactattctaaaatgcatgatcccctataaatggaaaaaggatctatttatactaagctaaaaaatttggacaaaaatgccctgcggggttagtgcggaccgcacaaaatggtgtgcagcctcattaagctcttgaacttgaaaacttgactctctgaactcaggctctgcggatcgcacaaaatggacatcggccgcggaggcttctagtgcgttccacacaaattggactgcaaaccgcacaggtttgaaagctgcaactttaccctctctgaatcttggctctacggaccgcacagaatggtagtgcggactgcacaaaaccttctgcggccgcactgccttaatgcctgaaataccagctctctgaatctccctagtgcagaccgcacaaagtgtagtgcggccacactaggcctgtttttcctgagtttgtcttgtctttggtacttgtgcaagtttcactcctttcgagccgatatttgacatcttgtcactttgttgatcaaacctgcaatcaagcacaacttatgagcctttttggactattttgtgtgaatttataatcaaagcgtaagcaagaaggagtataaaatgcgtcaaaatccctagttatcaactcccccaaacttaagcttttgcttnnnnnnnnnnnnnnnnnnnnnnnnnnnnnnnnnnnnnnnnnnnnnnnnnnnnnnnnnnnnnnnnnnnnnnnnnnnnnnnnnnnnnnnnnnnnnnnnnnnnnnnnnnnnnnnnnnnnnnnnnnnnnnnnnnnnnnnnnnnnnnnnnnnnnnnnnnnnnnnnnnnnnnnnnnnnnnnnnnnnnnnnnnnnnnnnnnnnnnnnnnnnnnnnnnnnnnnnnnnnnnnnnnnnnnnnnnnnnnnnnnnnnnnnnnnnnnnnnnnnnnnnnnnnnnnnnnnnnnnnnnnnnnnnnnnnnnnnnnnnnnnnnnnnnnnnnnnnnnnnnnnnnnnnnnnnnnnnnnnnnnnnnnnnnnnnnnnnnnnnnnnnnnnnnnnnnnnnnnnnnnnnnnnnnnnnnnnnnnnnnnnnnnnnnnnnnnnnnnnnnnnnnnnnnnnnnnnnnnnnnnnnnnnnnnnnnnnnnnnnnnnnnnnnnnnnnnnnnnnnnnnnnnnnnnnnnnnnnnnnnnnnnnnnnnnnnnnnnnnnnnnnnnnnnnnnnnnnnnnnnnnnnnnnnnnnnnnnnnnnnnnnnnnnnnnnnnnnnnnnnnnnnnnnnnnnnnnnnnnnnnnnnnnnnnnnnnnnnnnnnnnnnnnnnnnnnnnnnnnnnnnnnnnnnnnnnnnnnnnnnnnnnnnnnnnnnnnnnnnnnnnnnnnnnnnnnnnnnnnnnnnnnnnnnnnnnnnnnnnnnnnnnnnnnnnnnnnnnnnnnnnnnnnnnnnnnnnnnnnnnnnnnnnnnnnnnnnnnnnnnnnnnnnnnnnnnnnnnnnnnnnnnnnnnnnnnnnnnnnnnnnnnnnnnnnnnnnnnnnnnnnnnnnnnnnnnnnnnnnnnnnnnnnnnnnnnnnnnnnnnnnnnnnnnnnnnnnnnnnnnnnnnnnnnnnnnnnnnnnnnnnnnnnnnnnnnnnnnnnnnnnnnnnnnnnnnnnnnnnnnnnnnnnnnnnnnnnnnnnnnnnnnnnnnnnnnnnnnnnnnnnnnnnnnnnnnnnnnnnnnnnnnnnnnnnnnnnnnnnnnnnnnnnnnnnnnnnnnnnnnnnnnnnnnnnnnnnnnnnnnnnnnnnnnnnnnnnnnnnnnnnnnnnnnnnnnnnnnnnnnnnnnnnnnnnnnnnnnnnnnnnnnnnnnnnnnnnnnnnnnnnnnnnnnnnnnnnnnnnnnnnnnnnnnnnnnnnnnnnnnnnnnnnnnnnnnnnnnnnnnnnnnnnnnnnatcctcaagcaaataacataagacccaccccttaagggaaaattcaagaaattttcagctgtcctaaagcaacctcaattaacatcaattgggactaacaattgtcttcaacacacataagtcataaacaactttaacctttgaaaaaccatggatcaagtgtgacacaagagcatcaagagttgactcaacacatcaaagaacacttttcacttaccttggtcattgtggaacccaaactcacacatcctcaactctccctaagccaaacttacctttagaatagtggcatgcaaaacgaggttaatggaaattcaatcttctctctcaagaaaaagtcacaagttcggctctaaataccatatgctttccccttatgtgagtatccactaatgtaagctttattcaactcaacatcatataaggcttttttggagacattatgaaggcttttggttcagggtaggacatgttttggtcgaagtaggttccatcttcccttaagcacttcttttgattcatttggcgtaatttacttgactctttgagtcatttcacttctttctaaggggttagagagacacactgtcactctttcttatgtctttcagaccttttctccttttttagctttccacacctttcattctttgcttttcttgaatccctttttattctttttcagattgaacattctttttgtctttttgcttttctttatttttcattgcctttccttttcttcattttctttgtgactttttaccactttgttgccatccttgtctctccccccaaatttatactttttccatgtgctaaaggaaaggttgggtgccaagagagggtatctttttagaacgggtataggcttgtatcatggttcttgaaagaaaaaagtctaagactcaaaagggttgactagggatcttatcattggtaggctatggaattgttcgagatatcatttggatcaaggagagtctataatcatgtctcaagtcaaaatgcacttaggattttgcctcaaaaacatttagggaaagttctagaccaatggctcggtacttggatatgcaattcatttactcaccacacaagctaagggaacattaaagacatagagttaggggcctacaatgaccttagatacgatttgagcaaacaatgatcccgaaaaccacttgataattatcggtcaacgcaagagtctcaaggtcacacctttcaccatcctaaacacaacaatttgtttttgaccataagatcaagggaaaatgtgctaggcccaagtgaagctttgcttgaggcacccttaactactcactactaaaaccagaaagaaaaacagactcaaacccttaagaaggttgtcatgccatccatcactgggaagtgccacccggttcatacaacactccacctttggaaagaaccgtggtattaagaaaaccaaaggcttattggaaatgtccaaaacaaaacaaaaagctacgaacataaataagaagctaagaatgaaaaatttgcggaaaatagaatgaatatatacaagaggggatttaaatatacattagatgggatgaatatgtacaatgaaacgtaactttatatacagaactaaagtaaaataaaagtgtgataaatgtaacgaaatatcagaattatatacagaccaaagatgaaaaatcaagaaagcataaaaatgtatcaaatatatatgtacaatcatccaaaatgtaaaatgtagggcctaagccctcaaatgaaagctggcattgtccccaatgccaactagtctaaataaaacatcaaaaagataagaggaaaaaaggaaaaaggatgtagaagcctccctaagccctgcttgtctgcataggattatgagtggtccctggttcctctgtgtgctcgggaccctcagactggttcccagtggcttgctgctctactactgggacctagacaggctctggacctagtacatcctgtggctgattggaagaggtctcctgtgggtctgccaactggatgactgcatcgagcaataagtccaaaggcagctgatcttccttcaatcggtcaacatcaaccctcaatgctttcacggactccttggaagctcgtgtcttccgcagcttctttgctcccaagcaagctccttgagagccttgctatgtgaatcatatacctttgagagcacaacctgagtgtcaaggatcttcttctgattgtctaaaatctctttcaaagcatcctctatcaactaggaaacctgtagggctggaggtgccgactgagcctctaccgtggtagtctagatggacaacttagatgaggcagtcttcatccagttgttgaaatttagaagtgcctggcttagacggtgggtagtaatatgatgggcccagtaagatgggatctccgggcccgctgatgtggatagaccagcaggaatagctgtggatgtggaaggtccgggagagatgtcagcaggagtagaggtaggctcagcagggacctctaccataactggatctttagactggacaattggggcagaagcatgagctttgtagttcttgctcttggggttgttatcccccttcatgctataccaggaaaatggggctatctccttgaccttgatgtcatagggcctctcatccactttcaggtcccggaagtactcagtcaggaagctggggaatggattgtttctatcatgctcggcacccacaatagtaataatcctcgacatcacattccccatattgatggggtaccccaccataatagaagtgaccaatacagcccgatggagaggaaaggcgttgtcatgagtggtagggtccaaccggctgcaaacaaaagtctctcatcccctcgcttcaaagttcaggctctttctcaatattttgattccagcagccaaccagtcagggacggtacgtgggattgccaagtactgtgctagccatggacaaacctcctctcccatttccaaatttgccatgtataaggtctcgtcctctcattgaagctcaggtattcatttatatacttcccatcaaacaacaccttccaattttgaaccttggtcactttggagccctttttgatgtgggctacattgctgtaaaattctttgaccaagtgttcgttggaatcctcacacttatcaaggaaatggtcccagccaactctcatcctaaactgtctcctcatgttggggttgtgaggtagcaagtcactatcaatgaaactccgctccgggatcaactttctcaccggccaccactcctagaatttatggtatgccacttcactaacaaacctatcttgccaaacctcggctttctagttctcacaatcccccccccccccacacttgtggttcacctccttcttctacttcatcgtcaccacctacttcttcctcatctcctacaacaccctcttcagataatgaagctgtgggagtggtagagtattcatccctactacccgctggtgagccctcagacgacctagaagaaatgttcactgatgcttgggctgcggggaaaggggaagagtgtctctatgtctggccctctacggatacgagatgtattctgggattgagtccaaagagatatcccgagatggctcgtactcactccccgaaatgtcaatgtctttgtcagccacttttatggccttccttatgttcttgatgttttgcctagcttggggagtgagtttgaccattttctgtttccctcccagggaggattctcctcggcctggttgtttagagcctttcccttgttgtttcaccattgtctgcatacacaattcagttgaacttgttagaatcaatttcattagttgaaagcagtgtttcaacaagaaagcagaaagttgtagaaaatacctagtgcggaccgcacaaaatggagtgctgccgcacaagggccagtgtggaccgcacaaaatggccatgcgatccgcacatgggtggggttcagaatacccaccctctgtatcttgacagtacagactacacaaaatgtagtgtggccacacaggggctagtgcggaccgcacaaaatgtagtgcggccgcactgcccaatgttcagcttcccagaagttctttagtgtggtccgcacaaaatggtaccgcggaacgcactagggaatcgcagaccgcacaaaacgaccacggtccgcactgagtgcccaggtttggcattgagttagggttcgttggatttttgcttttaagtccaaattttcacctaatgagtgcccccaagtcatttcccagtccattaaactaacaaagtcctcatgaattcaaaatttaactactctagtctaggcaattgaaataaatacgggagggagaagaacagaagctaagaaaaataaaaattaaatgaaattgcaaaattaaacaaggaaagggaagattttgttaccagattatgagatgaagtgaaacgaatcaatgccaagcaagtaattacgatcaaatgcaagggatgaacaatattagtatgctttgagagttaaaattttgaaaagggtaacaagagaccctcaaggtctatttatagagaagccactggggcccagtctcacctactagtgtagactgcacaaaatggaccgcagtccgtactgaactgttttgttcaagtttgataaggcaacactctgcggtccgcacaaaatggactgcggctgcagaggtccaccgcagaccgcacaaaatgtagtgcggccgcggtggcaaactttatagaggcttcattttacccacaccagtgcggtccgcacaaaatgtactgcggccgcactggaaacttcagagacctgtgcatttttttcactatgtcttgcactgcattaacacaaccctgtaacatctcataaccagttagcccaaaaatcaatcctatacttcaaagaaaatcaaagaaagcaagaagaaaagcacttgggttgcctcctaagaagcgcctgatttaacgtcgcggcacgacgcaggttaccatcacatcatttgaaatgaagaagtgccaccacgtggctgtcatcaattttcccaatataatgctttacccgatgcccgttaactctgaaaacttcactatttttatttttcaaatcaagagcaccaaaagaggtcacaaacacaacttcaaacggcccaccccattttgatttaagttttcccgaaaacagacgtaaccgagagttgaacaagagaaccaaattatctactttgaactcctttccacaagcatatttatcatgaaggtacttcatcttgtccttatacaaggatgaaatggagtaggcatggaatctaaattcatcaagttcattgagctgctctacaggaagattggctgcaatatcccattcaagattcaacttcctcaaagcccatatggtcttgtgctctaactcaatcggaagatggcaactttcccaaacaccaaccgatacggagatgtaccaatcagagtcttgaaagctgtcatataagcccatagagcgtcatccaacttcttcgaccaatcggtcctattagcattgaccatctttgacaatatacttttgatttccctgttggagactnnnnnnnnnnnnnnnnnnnnnnnnnnnnnnnnnnnnnnnnnnnnnnnnnnnnnnnnnnnnnnnnnnnnnnnnnnnnnnnnnnnnnnnnnnnnnnnnnnnnnnnnnnnnnnnnnnnnnnnnnnnnnnnnnnnnnnnnnnnnnnnnnnnnnnnnnnnnnnnnnnnnnnnnnnnnnnnnnnnnnnnnnnnnnnnnnnnnnnnnnnnnnnnnnnnnnnnnnnnnnnnnnnnnnnnnnnnnnnnnnnnnnnnnnnnnnnnnnnnnnnnnnnnnnnnnnnnnnnnnnnnnnnnnnnnnnnnnnnnnnnnnnnnnnnnnnnnnnnnnnnnnnnnnnnnnnnnnnnnnnnnnnnnnnnnnnnnnnnnnnnnnnnnnnnnnnnnnnnnnnnnnnnnnnnnnnnnnnnnnnnnnnnnnnnnnnnnnnnnnnnnnnnnnnnnnnnnnnnnnnnnnnnnnnnnnnnnnnnnnnnnnnnnnnnnnnnnnnnnnnnnnnnnnnnnnnnnnnnnnnnnnnnnnnnnnnnnnnnnnnnnnnnnnnnnnnnnnnnnnnnnnnnnnnnnnnnnnnnnnnnnnnnnnnnnnnnnnnnnnnnnnnnnnnnnnnnnnnnnnnnnnnnnnnnnnnnnnnnnnnnnnnnnnnnnnnnnnnnnnnnncggtaaaaactttatgattgacaccgtacttagaaagcaacgtgttgaaagctctattgcaaaaatgagacccccatcacttatgattgcacgaggagtaccaaacctcgtaaaaatgcttttcttgagaaatgaaacaacactctgggcctcattgttgggtaaagccacgactttaacccactttgaaacatagtccaccaccacaagaatgtaagtgttcccacaagagctaacaaatgggcccatgaaatcaatgccccatacataaaaaatatcaacctctaggatggtattgagagtcatctcatctttcttcgaaattccagccgctctttggcactcgtcgcatcttttcacaaaatcacctgcatctttgaataaggttggccaatagaatcctcaactaagaactttagaggcggtcctcaccccaccatgatggccaccatagggtgaagaatgacaagcctccaagttactcaattgctcttcctccgggacacacctttggatcacaccatccgtgcaaatcttgaaaaagtatggctcatcccaataaaaatccaaactatccctattgagcttcttcctttggttagaagagagctcacacagaattattccggtcacaaggtaattagcaatatcggcaaaccatgacatatcattcattgacatcgcaaggagttgttcgttgggaaatgaatgattgatctcaaggccatcacaaggcctcacctcctcctccaaatgggacaagtggtctgccacttggttctcactacctttccgatccacaatttctagatcaaactctgtaagtagtagcacccgtcgcattaatcttgacttggagtctttcttcgtcgtcaagtacctaagagcgtcatgatcggtgtgcactatgactttggcacccataagatacggccgaaacttttccattgcaaacactatagccaacaactcttcttgataactgtgtagttcttttgagcctcattcatggtcttgcttgcgtagaacaccagatgaaatattttattaaccttttgacccaaaacagccccaactacaatgtcgattgtgtcacacatgagctcgaaaggcaagctccaatttggtgcggtaatgataggagtagtggtcaacataagcttgagaagctcgaatgcttgcatacatccctcattgaacacaaacttagcatccttttctagtagcttgcacaaggggtttaccacattcgaaaaatcttttataaacctccgataaaaccccgcgtgcccaaataaactcctcacccctttgacagaagtggggggaggaagccttgaaataacctctatcttggctttgttaacttcaatcccacgctttgaaattttatggcccagcactatgccctcctctaccatgaagtggcatttttcccaatcaagcacgagattggtgtcttcacatcgggttaatactctatctaattttttcaaatactattcaaagaaattaccaaccacactgaaatcatccatgaagacctccaagatatcttccaccatgtcagtgaaaatagccatcatgcatcgttggaaggtcatcagagcattacacaacccgaacgacatccgagagaaagcgaaggttccatacggataggtaaaaatggtcttctcctagtcctccggggcaattaaaatttgattataccccgagtatccatccaaaaggtaataaaagctctccccgcaagacgatcaaacatttggtcaaggaatggcaataggaaatgatacttttgggtcaccttgtttagcttctggtactccatacataccctccatccggtaactgtccgagtgggaataagttcattgttgtcatttgttaccacagtcataccaccctttttcggtannnnnnnnnnnnnnnnnnnnnnnnnnnnnnnnnnnnnnnnnnnnnnnnnnnnnnnnnnnnnnnnnnnnnnnnnnnnnnnnnnnnnnnnnnnnnnnnnnnnnnnnnnnnnnnnnnnnnnnnnnnnnnnnnnnnnnnnnnnnnnnnnnnnnnnnnnnnnnnnnnnnnnnnnnnnnnnnnnnnnnnnnnnnnnnnnnnnnnnnnnnnnnnnnnnnnnnnnnnnnnnnnnnnnnnnnnnnnnnnnnnnnnnnnnnnnnnnnnnnnnnnnnnnnnnnnnnnnnnnnnnnnnnnnnnnnnnnnnnnnnnnnnnnnnnnnnnnnnnnnnnnnnnnnnnnnnnnnnnnnnnnnnnnnnnnntacattgcaccggagaagtccatgagctatcggaaatggggtacacaacaccagtatctaaccacttgatcacttctttcttcaccacttattgcatttccccattcaatcttttttgatgctccaaggaacgctttgcatcatcctccaagataattttgtgcatacataatgcggggcttattccccgaatgtcagccaaagtccatccaattgcccttttttgcctttgaagcaccgccaaagtggcctcaacctgcatgttagttagacaagaagaaagaataactggtaaagtagaatttgagcccaaaaactcatacctgagatgtggaggtagtggtttcaactccaacaccggtgactcctcaattgatggttttgttggtggagtttttcggttttcaagatccaaagataatttcctaggctcataagaataagagcctatcccatgtaaggcattcacgcactccactctgcttgcattatcattgacatcaagatttaatagcatggcctcaaggggatcctccacgttgatcatagcactggtgtcatccacaatcacagctgtgacaaggtctacaaatgagcacacctcggtgctattgggtttcttcattgatttccaaacatgaaagacgactttttcatctcccacttagaaagtgagctcacccacttcaacatcaaccaatgccttccccgttgtaagaaaggccttcccaagataataggaacctcatagtccaccttacaatccaaaatcacaaagtcggacggcaatatgaatttgtccacccggacaagcacgtcattaataatgcccaaaggtcgcttcatcgatcgaaccgccatttgaagtctcattgaggttggcctagcttgcccgatacccaaagttttgaaaaccgagtagggcatcaaattgatactagctcccaaatcatatagagccttggcaaagtccgcactcccaatggtgcaaggaatggtgaaagcaccgagatcttcaagtttcgaggccattgaatgcactatagcactaacttggtgagtcatctttatagtttcacaatccatagaacgcttctttgtgaccaagtcttnnnnnnnnnnnnnnnnnnnnnnnnnnnnnnnnnnnnnnnnnnnnnnnnnnnnnnnnnnnnnnnnnnnnnnnnnnnnnnnnnnnnnnnnnnnnnnnnnnnnnnnnnnnnnnnnnnnnnnnnnnnnnnnnnnnnnnnnnnnnnnnnnnnnnnnnnncgaattttgcatagcccgggatttgttcaagagcctccaccaaaggcgcattaatggacaggatcttcatcatgtcaatgaactttttaaactgattatcatttttctgcttcgcaagcctttgaggataaggtggaggtggcctaggcaaaggaaccttggcttttggcacaactaactccggcatgtcaattatgtgtttcctagacgggttcacatcattttgagtttccacctcgacatcgttaacatcaatcctcacttcattgttcacatttttatcaaccacatcttcaactaccaaagggatttcctcttcgtgcaactcaacatcatcatccaaaacttgcttttgcttagaggcattcacatcaccacctctcccacttcttgttgtaaccgccatcacatgattgtttccactcttcgggtttactaccgtatcacttggtagagcacccttcaggcgggtattcaaagactgagagatttgtcccaattgcacctccaagtttcggatagaggtattgtgggatgccaattgtgcatcagaatccacattcttcttcatcatttgttcgaacatcatttcaattctacctaaatcattgctagaagaactaggaccttgagagaggaaagggggtggattgtttggttgttcgtacattgggggcctttgaaatccttgcccccggtttccttggttcccattattccatctaccttgattgttattattgcccccattgttattattaccattccaattcccttggttgccttgattgttgttctgattcccccaattgtcgttttgattattgttcccccaattaccactattttactgttgattgccccaatttccttgaggtatccattgttgttagtttgaagagttgcctcgttgaccttgatagttgtttacatattgaacctcttcactttggtcatcataaccataattttgacacccattatagtcatcaacaaattgctcagaattcccttgattttattgccttttttgtcttctcttggtaacaagcatattgacaccctccatggcattcacctggcaaggattctggacttgttgcaactgatccttagccaattggttcatggtagtcgtcaactccgctatagcttgtccatggtcatgtaatttcttatgcaaatgaataaccgtggggtcaccttgaggcacattggctctactttgccatgcagaagaagtgtcagccatctcatcaagtacatcacatgcctcatcatatgatagcttcacaaagttgcccccgaaaagttggttcactatgcattgatttgttgtattgatgccctagtagaaggtttgttggatcatagcttcggtcatatcactccttcaccatcgttctacaccgctcccaaatctcatgcaaaggttccgtggtctcttgcttgaaagccaatatctcatctcgaagtgccgccatatgcctgggtgaaaagaatttagaaatgaatttatctgccaactcatcccaagttgtgatggaatggttggggagtctctcgagccaatctaatgccnnnnnnnnnnnnnnnnnnnnnnnnnnnnnnnnnnnnnnnnnnnnnnnnnnnnnnnnnnnnnnnnnnnnnnnnnnnnnnnnnnnnnnnnnnnnnnnnnnnnnnnnnnnnnnnnnnnnnnnnnnnnnnnnnnnnnnnnnnnnnnnnnnnnnnnnnnnnnnnnnnnnnnnnnnnnnnnnnnnnnnnnnnnnnnnnnnnnnnnnnnnnnnnnnnnnnnnnnnnnnnnnnnnnnnnnnnnnnnnnnnnnnnnnnnnnnnnnnnnnnnnnnnnnnnnnnnnnnnnnnnnnnnnnnnnnnnnnnnnnnnnnnnnnnnnnnnnnnnnnnnnnnnnnnnnnnnnnnnnnnnnnnnnnnnnnnnnnnnnnnnnnnnnnnnnnnnnnnnnnnnnnnnnnnnnnnnnnnnnnnnnnnnnnnnnnnnnnnnnnnnnnnnnnnnnnnnnnnnnnnnnnnnnnnnnnnnnnnnnnnnnnnnnnnnnnnnnnnnnnnnnnnnnnnnnnnnnnnnnnnnnnnnnnnnnnnnnnnnnnnnnnnnnnnnnnnnnnnnnnnnnnnnnnnnnnnnnnnnnnnnnnnnnnnnnnnnnnnnnnnnnnnnnnnnnnnnnnnnnnnnnnnnnnnnnnnnnnnnnnnnnnnnnnnnnnnnnnnnnnnnnnnnnnnnnnnnnnnnnnnnnnnnnnnnnnnnnnnnnnnnnnnnnnnnnnnnnnnnnnnnnnnnnnnnnnnnnnnnnnnnnnnnnnnnnnnnnnnnnnnnnnnnnnnnnnnnnnnnnnnnnnnnnnnnnnnnnnnnnnnnnnnnnnnnnnnnnnnnnnnnnnnnnnnnnnnnnnnnnnnnnnnnnnnnnnnnnnnnnnnnnnnnnnnnnnnnnnnnnnnnnnnnnnnnnnnnnnnnnnnnnnnnnnnnnnnnnnnnnnnnnnnnnnnnnnnnnnnnnnnnnnnnnnnnnnnnnnnnnnnnnnnnnnnnnnnnnnnnnnnnnnnnnnnnnnnnnnnnnnnnnnnnnnnnnnnnnnnnnnnnnnnnnnnnnnnnnnnnnnnnnnnnnnnnnnnnnnnnnnnnnnnnnnnnnnnnnnnnnnnnnnnnnnnnnnnnnnnnnnnnnnnnnnnnnnnnnnnnnnnnnnnnnnnnnnnnnnnnnnnnnnnnnnnnnnnnnnnnnnnnnnnnnnnnnnnnnnnnnnnnnnnnnnnnnnnnnnnnnnnnnnnnnnnnnnnnnnnnnnnnnnnnnnnnnnnnnnnnnnnnnnnnnnnnnnnnnnnnnnnnnnaagtgaaaatgggaaaagtctcaatctaagcacatcttcggacacattcgtttgcttgctcccccagcatgtatccacgaaccccttgagatgtttgtagtcattttgatccgcagcgcccgtgaagtatccacgctgctcaagtaaggtcaacatcatattggttatctgaaaattgccctcacagattcggggtgggacaatagcacttgcatagccttggttcggtaatactctgggagccactcttggaggtggagaaggagggtctggaatattgccatttggattagcattggcatttcggcctctacattgtccttgaggtacaagaggcacctcatcttgttcaacatcatctacctcctcccccgcaatcacgtttccaagagggtcattagtgttgttcaatgccatattggtacctgagtcgcaacacaaacaagtaagtaacaaagaaggaaagaagaacaatacacaacactaactgaatagatagccaaaaccgttagctccctggcaacggcgccaaaaagtgatcgcgacctactccgcactactaattatgtagcgagagagggtcagagcagcttttacccaattttgggtcgggatcgatatccacagagagctagaattggaattgagtatctatttagcctaggattgcgtagcgttccaaattgcacttctcataatttttacggttttcttttataattctacttttaacaaactacaaactgcaaattaagctaagagttaaatgctatgggttgttcaaatattctaaaagctctagggtagtggcatccacctaagtggtcaattgacgggtacttgaaactaaggctctattgatattattggggagtatgatataaccgttgcactactttacccactatacacctctcgatggttcaagtgattttgcctaattgactttctcaagaccaataggtatgcaaatttgctcaagcaacttagggttcaagtcaggtattactctctcgaggtttaaccctttaattgagactatcaattctcttgagtccatcccaattccttgttggatcaatttcggagacttaggccctctttctaaagaagagcctaagtcaacttagcacaaactagtgtttgcaaccactaattcagtaaataaaccatgaaattgacccaaataacaaacacctatagtcaatctagccctaaagtgaaacacccatcaatttcccacactagggttgagccacaaacctagctaatgggtctagctactcatacttgaagagaaaaatagagaaatagatgaagataaacacatattaattaattgctaagctaaatacaaagattcaatgataaaaagtaagtataaatgcccaaaatggctacaagatttgttcccacgagtgcaataactattctaaaatgtctgatcccctaaaaatggaaaaaggatctatttatattaaactgaaaaatttggacaaaaatgcccctgtggggttagtgcggaccgcacaaaatggtgtgcggctgcactaggctcttgaacttgaaaacttgactctctgaactcaagctctgctgaccgcacagaatggactgcggccccagaggcttctagtgcggtccgcacaaactggaccgcggaccgcccaggcttgaaagctccaacttcaccctctctgaaccttagctctgtagaccacacagaatggtagtgcggccgcattgcctttagtgcggacctcacaaaaccttctacgaccgcactgccttaatgcctgaaataccagctctctgaatttccctagtggggaccgcccaaagtgtagtgtggctgtactaggcctatttttcctgagtttgtcttgtctttggtacttgtgcaagtttcactcctttcgagttgatctttaacatcttgtcactttgttgatcaaaccttcaatcatgcacaacttatgagcctttttggactattttgtgtgaatttataatcaaagcataagcaagaaggagtataaaatgcgtcaaaatccctagttatcacatgcttatatatgcatatatgttattttgaaactatatttatgtattaaaaaaatatatataggaaaaaattgggtatcaacatcgaaaattacaagtttcaagattatctgttgtgatggtcggtacttcaaatcttgtcttcaagtttcagcaagcctacacctcgacaaaccttgaagtagggggcagttgtagacactaaaattttaacagattaagataaatcctaaattcaagacgattcttgaattattaggagtctattagggtacttggtggctactccatccaaaccctaattcatgcctacaaataaggctacatatgttcttcaaagacggtctcaacagttccataaactctcaaaacatgcacgagatcaaatatacgatctctaaaattccataaaattcttggaatattcattaatagatcaaagacatgccaaatatgtcttgctgaaatttctagcaacagtcaagatccaaacggagtgctgctatattcttcttgatcatcaaatacatcaaggagatgcatatcattctactttcgagaaatatgctgctaagaccctcgaatcacatagaataaatcggagggaagaatcaagggataaacagagttgtaacctataatgtttataaataaaattctttttttctttatagttgtttgtgattgcaattttgtttttctctgcataaatttgttgcaaacaacatgtattattttcaatcaagaacaaaaaatataaaaatagtgcaccacctgtagtatatttgcacatcctgttgttacagttgatttccatgttttaatttctttcttccgacgtacgtaccaatattcattaagctagatttaaatttacattaaagaacaaccacaaagattaattaatgaaatttacatgtacggttccaatttattccgatgttaattgtatgggccaaaaattatcttagctgtatttgtcgcgcctcctttttccctcttcgcatcggaaatcggggttatgacatttttgaggtaggacaactcattccttttgggaactggatttgcatttgaagagtcgccacctaatgatttaaggtgcattaggacacctatagggttcattttgaagtttgtttgatgaccagagataggtaatggcttgaaattatcctaaggtgaaggtgttaggcacctctcaggatccactagtgtggttcccggccagacagttttgtgaattttgtacaattagcaaacagacaaatataggctcaaatagtaggggatttaagtttaaacacataagagtttgaaaaacaactgtaacaaggcaaattttgaaaaggagttacattttacaaatacttgagaatgtaaaaagaggggggtgggggatcctaggtttatttataatatggatcacatcaatgcgatacccggtatgacactcatcgaaagagggaatacacgtggtattagtgcaccggtcatcatattcatatctatccttcccacctcgttaaggtatcaaagtgcagattggtctcgacctctattgtatgttattacccgtcccattcctatcagtcccggaggaatttaggactactattcctataagagggaggattttaggctgactcttgagttttaaaggtaaaaagtctaaggcgacatacaaaacacgtagaactgcatattagggaaaacatataaataaataagaggctcatatatacctccgcagacaatgcacataaatagcatgacttaaaaacagttagggtctaaatttaaagtactaagacagggtgtttttgttgaagcagacaaatttattacataactcagataagaagccccaatcatgcctgcctgctagttgtagcagttgttaattaaacaaaggcggattcagtttaatcatcaatacctgaggcttgcctaagtgtgtattggtgatttcctataagcatgatatatattactgattaagaaggcagcagagcagtggttaatttttaaacagacgatttggaccctataggcatcctttctaaaccgcattaatgaaaggaataggttgttcaaactgattctgaacagtacaagtcaaactgattttttactaaactggtctcagatcctatagacatgatctcgattatcgctgattttaattcctaccagcatggtatctaaatattaaatgctgatttgggtcctataggcatgatatctagttgaacgtgaagtgaaacaagcaggatttgatcacagcgaaattcctataggcatgacttttataaaaatattgattttaatcttataggcaatacatctaatttcaaagctgattttaaccttatatgcatgatgtctaagtgtggaagtaaaacatgcagaatttattaaacagatcctataggcatgtcatctatccttctaatagctaaaacatgtataatcaccccatcccttttcactagccagcccctcaatatttgttacaaattattacagaccaaaaatgaatgagttacatcagaaaagtgcgaaaacaaggagttacaaccataggaagcctgattcttgacttcctctctgagttatggaataaactacctcaaaaaccaatgttctcaaagcctttcttagatctggttgtgtcaaagttccctaagggtctcaagggaccccgggtagtgcttacacccaagttgcataaccagacaaagatgagtgcagtgtggaagggccagggcatgcccacaaactagccagagaacacaaacacatagaggggatatgggggtttgggattcctaagtcagcaaatcacataacaagtgactgacagagtacatatataagggaaacattaatttaaaaggggatggagcatattacaacatgctagtaatgtaacttgattgcataaacataagcagaagtaggcaagagtgaaaggaactgagatagctaaagaaacatgttgttgttgatgcttcaaaattagcatggacataccagtagagaaacagagtgcagaaagaaagaaataagcaagattccacagtctagccttgggctttcagctggctaaacaaagcagtagcataagcagcagtaaagaaaagagagaaagttttgagtgtaagtgtgtgttcttgaactcaattgttcgtgtctttgaaagaagagagggtgcagggtatttataatttttgaaaacgagtgaaaagtaaggtaagaagtaaagtcttaacagaaatatggaagcaatcccaatcagaatcaattaacataagtggttccctttaattaagaaatcagttttgggaaaagattgattattgccatataagggagtagtaaaattatgaagtaaataatcaagtctaagtataaaataggcttattttgggaaaggattcagcaaggtaaaacatcacagtaaagggaaaggaatcaattaattttaaacaggtgagtgaaattagggttcataaaagaaaagcctttgcaatcagtcacaagatcaagatcaatcaaaggagaaacatggttctgcatttcagtacataaatagagtgaacagaagcatcagacatgcgaggccaaaaacattggcaaaagagataatacaaacatacagtagtggcaaaaataagctaggattcagtagtaagaaaaagtattcaaagcacagtagtcaagtaggtcaagtagtcacatagaatcaacagtgaagaagaacatagtatcaggtaagagaaatcggaaataagtaagtgagcaaaaacttctaagaaatttagggcttcaacagtagtcgagtttaatagatgaaaagaactcaaatcaaacaagtcgaacaaggaaaagagagtcataaacgaagaacttaagataagcacacatttaagcaaataatttcagaactcggataagactaaaaagaactagggttttaaacatgctgactcaagtagaaggaaagcataaacaggtaacatagcaaaatcatgaaacaacaccaaaatcagnnnnnnnnnnnnnnnnnnnnnnnnnnnnnnnnnnnnnnnnnnnnnnnnnnnnnnnnnnnnnnnnnnnnnnnnnnnnnnnnnnnnnnnnnnnnnnnnnnnnnnnnnnnnnnnnnnnnnnnnnnnnnnnnnnnnnnnnnnnnnnnnnnnnnnnnnnnnnnnnnnnnnnnnnnnnnnnnnnnnnnnnnnnnnnnnnnnnnnnnnnnnnnnnnnnnnnnnnnnnnnnnnnnnnnnnnnnnnnnnnnnnnnnnnnnnnnnnnnnnnnnnnnnnnnnnnnnnnnnnnnnnnnnnnnnnnnnnnnnnnnnnnnnnnnnnnnnnnnnnnnnnnnnnnnnnnnnnnnnnnnnnnnnnnnnnnnnnnnnnnnnnnnnnnnnnnnnnnnnnnnnnnnnnnnnnnnnnnnnnnnnnnnnnnnnnnnnnnnnnnnnnnnnnnnnnnnnnnnnnnnnnnnnnnnnnnnnnnnnnnnnnnnnnnnnnnnnnnnnnnnnnnnnnnnnnnnnnnnnnnnnnnnnnnnnnnnnnnnnnnnnnnnnnnnnnnnnnnnnnnnnnnnnnnnnnnnnnnnnnnnnnnnnnnnnnnnnnnnnnnnnnnnnnnnnnnnnnnnnnnnnnnnnnnnnnnnnnnnnnnnnnnnnnnnnnnnnnnnnnnnnnnnnnnnnnnnnnnnnnnnnnnnnnnnnnnnnnnnnnnnnnnnnnnnnnnnnnnnnnnnnnnnnnnnnnnnnnnnnnnnnnnnnnnnnnnnnnnnnnnnnnnnnnnnnnnnnnnnnnnnnnnnnnnnnnnnnnnnnnnnnnnnnnnnnnnnnnnnnnnnnnnnnnnnnnnnnnnnnnnnnnnnnnnnnnnnnnnnnnnnnnnnnnnnnnnnnnnnnnnnnnnnnnnnnnnnnnnnnnnnnnnnnnnnnnnnnnnnnnnnnnnnnnnnnnnnnnnnnnnnnnnnnnnnnnnnnnnnnnnnnnnnnnnnnnnnnnnnnnnnnnnnnnnnnnnnnnnnnnnnnnnnnnnnnnnnnnnnnnnnnnnnnnnnnnnnnnnnnnnnnnnnnnnnnnnnnnnnnnnnnnnnnnnnnnnnnnnnnnnnnnnnnnnnnnnnnnnnnnnnnnnnnnnnnnnnnnnnnnnnnnnnnnnnnnnnnnnnnnnnnnnnnnnnnnnnnnnnnnnnnnnnnnnnnnnnnnnnnnnnnnnnnnnnnnnnnnnnnnnnnnnnnnnnnnnnnnnnnnnnnnnnnnnnnnnnnnnnnnnnnnnnnnnnnnnnnnnnnacatagtaagcacagatctaaaatagatctgaagaaaaatgaaagatcttatagattaaggttttggaaaacgcagaaaaggagagaaagaccttgaaagttaccgatctaaaagtcaaggatctgccttgaaaggccatgaatggccggagaaaggtcatggatggccagagaaaggccatggacagaaatagagcaaggaatggaccagattccctcgaggtctggccatgaaaccatataaacaaacacgcaggagccgcagaaggctaatacacatctcaaatgtccatgagaggccatggattaggcaggggttgaggtggattcgggtgggattagatggcgacggctagggttcatgagggattgtagagagagttgagagaagagggattcaaggacggagtttggtgaagaatgaggtagggtaaggggctttttgggtttaattatggaagggtgaatggtggccgttgatttgagtgatcaacagcctggattcaaaagggtaggtgaggaatccgggttgggttgtttaattaggttagggatcgggttttaatgggaattgggccgaggaaattgggtttaatttggggtcatatttaggctaaaattgaaatgtaactgggctattatttaaatagacaatttttcccttttaaaattataaaaaatagtaaattaattcctgaaaataaattgagagtactaaaatgatttgtaacatataattaacaatttaaaaatacaggcttaattttatgaatataaaacataattgaatcttaaaagggccaatattgcaattatatgcaatttagcttaaaaatagtaaataattttataaaaaatatgcaaaaattaccttagctatatcgtagtataaatataaaagtccaacaaatgaattacaaaaataataattttggtcacaattattggttttttatggataaaagagggaaataaattgatttaaaaacctttaaaaattatgaaaaaataataaaacacttggatatgcttaaatatgcatatatattaaatttgaagttattttgcatattgaaaatatatagggaaaaattggatatcaacagttgccctctttacccgggaaggatgaaagagttgtcgggtaaagatatgatggccaattttgaccaagcgaaacagtttgaagagatttaggacgcaccatggattttgatctacctacatacccctggttttacaagaatcaggtcatatgtagttcaggatccgtcggtggagtatgccgatggagacttttcaagaacggacgcaatatccaggatggggtgagtggacggcttgtgggaatggttaaggttttatatggctgcgggaactggagtgggaccgcttctgccgggatgtccgttgctcgccggtttacctgcaattagaaacaatacaagcgtatatcgcgcataaatttaaacatgatgcaaattcacgtcggaccatgaatgttgtcttcggacgatgaggatgatgtccttagaccatgattccctgggccatgaagcgtacaataaaggactcgccggccatgaaatgatgctctcgggctatgaggatggtgcctccgaaccatggtgcctttgaataatgatatgcaacagattaaaaggggtcctcaggccatgacatggtgttcttaggctatgaagatgatgcctctgaacgattacgcctttggataatttggcgatcttttagcccatgagatgcagtatgaggcaatctttcagcccatgagatgcagtagcatgatgcggacaagacagagcttagtcttgcgaattgaaggacaaagcttagcccgtaagagaaatgaaatagacgatgcttgagatagtgcttagtttcgaagaaaattggaggcagagcttagcctcagaaggtataatgatagccttatgcaaagatgaagaatgcggagagaggtagagcttaacctcggaagacagaatgttaaccttatgtaagaatgcagatggagacatcgtttagtcttggaaggcaggacggtagccttatgcaaaaatgcaaatacagaaagaggtagaacctagctttggaaggcagaatggtagccttatgcaaaaatgcaaatccagagagaggtagagcttaacctcgaaaggcagaatggtagccttatgcaatgcaaatgtagatggagacagcgtttagtctcagaaggcagaatgatagccttatgcaaattggaaggtagaatagtagccttatgcaatgcaaatgcagatggagacaacgcttagtattggaagacaaaaaggtagccttatgcaagaatgtagatggagacaacgtttagtcacagaaggtagaatgatagctttatgcaagaaataataaaataacgaatgacaatagagttttcttagctgatagcagattgtggcattatgattattgggagcattgtgactacggagaattacttgtgtactgatagcaaatgttggcaagtgcaatggttcggagagtcgtactcataggcatatagtatgtttaatgattttgcgattctagtacctgcatccaaagaaaaatcgtgagtttagatgaaccgacgactgctaaacaaaacaatttcaataataaacatgcatgcttttgtaaaaatatgacataagtgtataaatataattttttagatgaaccgatgactgcgacgtagcttgggacattgtaacctctccagctatggaattttgagggtccttctcaaaattctaccttagtttaacaggtttatgtttctgactgttgctcatgtggtgatcggctgaaattacttcagaattttgagggtcctccttaaaattctgccccaacttctaattgtggtgggaaatgaaaattttattgaattgtgaccgaacccatagggttgcctatgtatcccctcttaaacaggaaacaggtcaggtgtagttcaatttacatcatataaggaagcataatgattacacacagtaatgcttgactgcatctgaattgatcgactttggccaaacttcttctccgtccatttctacaacatccatctagatctgatgataaccagcgaagtaatccacaaatgactgtaactcatgcttggtgcaattgtcaatcaggatgtgtatatttggcaaagggaagtcgtcttttggactcgcccagttgagatcccggtagtcgacacaaactctgaccttcccatccttctttggcactggtactatattggctaaccatgtcgggtactctactaccctgagaaccttagctttgacctgcttggtgacttctttcttgattttcggactcgtatcaggtatgaactttttgagcttttgctttaccggtggacacgttggatcggttggaagtttgtgagacataatagacgtactcagaacagtcatgtcatcatacgacctgacgaatatgtccttgtattcctttagaaattctgtgtattcttccttttctaatggcgataggtgaacgttgattcgtgtttccttgacattttctacatctcccaagttaacaatttcggtctcatccaggttggacttaggtctattcttaaagttctcaatttctttgacaatctcatctggtatgtcatcttcctctgaatcattgtccatttgttgcgttgtctcattacatgtcacagttattggttcatcaagataagtaatagtaatgttgtataagtaaagtaatgggagaaaatgataatgagtgttgatttatgagaaaaaatcaaaatgctttgataaattgcataattgttttgaacattgaaggttttattgcgggaattgaaaaatgcgaaaagaaaatcatttaataaataaaacagagaatgatgcttgttttagccttgccaccccgaggctcgttaggttctggttgtcctaatggtccaattattgaggcgtgcctctctgctcatagcttgtatggaagggccttcctccccctcctccttgagaacaacacaatagtccatgtcattgtcttctaggaataagctcttcaccgctgaaagtgcttcttattcgtctgacccataaacaatgtcagcctgttggaaaatcttctctagatccagtattggctgctctagtggatagtaaggactgcgccatggtggcgaccagttgttgaattcttcccaagtgtagtcatatcccaaaccgaaggtagtgccatgcttcttgagttgtatgggcttggtgatttcttggaggttcttgccgagacccttgccaggttcgtacccactccaattcagtatactctcgattttgttatcccaccatttatctttgtcaacaacattttcccgttcaatgtggtggtaagtctctccacttagctttcttcttccttcgattgccggaatggtctggagactgtatatagggttgctactgtcgccgtgaatgatcacctcctagtgtttccattcgaattttactgcctgatgcaatgctgacgctacggccccagcaacatcaatccatggccgccccaatagcagattgtaagatgctggcacgtctatcacctggaaattaacatcgaaccatgttggtcccatttgcaagcataggacaatctcacaaatggtggatctctaggaaccatcgaaggctttcacattgatagctccatcttatatctcgtgtagtcccttacccaacttcttgagtattaccagtggacaaatgttgagactagaacctccatcgatcaggattctggtgataaaatagtctttgcattgcacagtgatgtgcaacgccttgttgttccccaacccttcaggtggcagctcgtcctcatgaaaggtgatcttatggctctccaacacttgtcctaccatgttagccatttccccnnnnnnnnnnnnnnnnnnnnnnnnnnnnnnnnnnnnnnnnnnnnnnnnnnnnnnnnnnnnnnnnnnnnnnnnnnnnnnnnnnnnnnnnnnnnnnnnnnnnnnnnnnnnnnnnnnnnnnnnnnnnnnnnnnnnnnnnnnnnnnnnnnnnnnnnnnnnnnnnnnnnnnnnnnnnnnnnnnnnnnnnnnnnnnnnnnnnnnnnnnnnnnnnnnnnnnnnnnnnnnnnnnnnnnnnnnnnnnnnnnnnnnnnnnnnnnnnnnnnnnnnnnnnnnnnnnnnnnnnnnnnnnnnnnnnnnnnnnnnnnnnnnnnnnnnnnnnnnnnnnnnnnnnnnnnnnnnnnnnnnnnnnnnnnnnnnnnnnnnnnnnnnnnnnnnnnnnnnnnnnnnnnnnnnnnnnnnnnnnnnnnnnnnnnnnnnnnnnnnnnnnnnnnnnnnnnnnnnnnnnnnnnnnnnnnnnnnnnnnnnnnnnnnnnnnnnnnnnnnnnnnnnnnnnnnnnnnnnnnnnnnnnnnnnnnnnnnnnnnnnnnnnnnnnnnnnnnnnnnnnnnnnnnnnnnnnnnnnnnnnnnnnnnnnnnnnnnnnnnnnnnnnnnnnnnnnnnnnnnnnnnnnnnnnnnnnnnnnnnnnnnnnnnnnnnnnnnnnnnnnnnnnnnnnnnnnnnnnnnnnnnnnnnnnnnnnnnnnnnnnnnnnnnnnnnnnnnnnnnnnnnnnnnnnnnnnnnnnnnnnnnnnnnnnnnnnnnnnnnnnnnnnnnnnnnnnnnnnnnnnnnnnnnnnnnnnnnnnnnnnnnnnnnnnnnnnnnnnnnnnnnnnnnnnnnnnnnnnnnnnnnnnnnnnnnnnnnnnnnnnnnnnnnnnnnnnnnnnnnnnnnnnnnnnnnnnnnnnnnnnnnnnnnnnnnnnnnnnnnnnnnnnnnnnnnnnnnnnnnnnnnnnnnnnnnnnnnnnnnnnnnnnnnnnnnnnnnnnnnnnnnnnnnnnnnnnnnnnnnnnnnnnnnnnnnnnnnnnnnnnnnnnnnnnnnnnnnnnnnnnnnnnnnnnnnnnnnnnnnnnnnnnnnnnnnnnnnnnnnnnnnnnnnnnnnnnnnnnnnnnnnnnnnnnnnnnnnnnnnnnnnnnnnnnnnnnnnnnnnnnnnnnnnnnnnnnnnnnnnnnnnnnnnnnnnnnnnnnnnncatatgcttcactcagcacctttagcagagcattcttgtgtgcctcagaattttgtagcaaagcaagaatggatatttgcgctggtgttttgttcaactggtcaatggccgagtattctttggcctgtattttcctccaaagatcgtctggacccatctcaattgggcggcctattagaggcctgctttcttaactcagctagatgttcaggggtatagactctaccagttcttgtcataccctgtgctgcaacggtctcttcgaacctgaccttgcctttcctcctcgcctcggctgtataatcccaagatacaacctttgtatggaatggtgtcatggttggcattgctactgggattggcacggctaacctcactccgaatggagcatatgcctcgggtagtaaaactgtaacctcaaatattgtgggtgcattttacggagacacgaattcaacctcaattagtgttggtgtctttgcggatgaagttaattcaaattcaagtggtacagacaagtctacctcagcatcctcagacggttgtatctagactatgattggattgagagtgactgttagcttctttgggtcatcacattctatgatcaacccgatagatccatcgagatcctaatcatcctctatttcaatcatgtggatacctctacccttatggtctggcatagggttgttgtggacatttggagcaggttcctttgccataataatcttgttatcaattaaagactggatcttgtctttcagggaacgacattcatcgatggtgtgccatttcatgccggagtggtatgcacaggatttgtttgggtaacccactcagaagggttctcaggggttgcagcagagatggaggtgacataactagcagctttgaatctctcgtacaattggtcaatgggtttggcaatggctgtatattgttttggaggactgcgatcaaaattaggtcgaggtctagggaagttttggcgtgtaggaggtgattgatagtgggatggtggagcattgtaggtttggtagacatgagcgggttcgaagtatctggttgaagtaggttgatatgtgagaggtagaggtgattgataagttggtggtgagggtgcttggtagtttggagttggctgatatatgagtggaggtgttgggtaagtttgttatttgaggggagattttttcctttgtgcaaccatcacggaccctacgtcccttttcttggatgcaccaccagactgcaaggccttatttgaagtttgcaaggccttgaagtttgtaaccatttcgtttttgataccctcttcaattctttcacccagtttgataatgtcggagaatttgtgactctcgatcatcatcaatcattcataatactgcgggtcttgagtccggacaaagaatttgttcatatgttcctcttctaaggcaggtttgaccttagcagcttcagacctccagcgagtagcatacccgcgaaatgtttctgtaggcttcttctttagattctgaatatagaacacatccgcacattttttgtgttaaacctaaacctgtacataaaatcgaatgtcatgcctacccagattgaccacttctttggatcttggctgatgtaccaggacaacacatctcctttcaaacttctcatgaacaacttcatgcggattctcttgtctttccctactctaaccatcttgtcacagtatgttctcaaatggatccttatatccactgtatcatcaaacattttgaattttggatgtttgtaccccttgggtagttcgacatcgggctatatgcaaagatcttcatagtttagcccctcaattcctttacttcctttaatgccctgaatccggctagtcaatttcttaagttcctcagctaggtttctgatgagcatgtctttttcatcagactcgggtgtgcttgagataggttgggtggagtgcggcatggtctacacgtagataggggtgtgaaaatggtcatttgtggagttttggggttctgggatgagtactggagtattgtttggtgtatggtaggtgttgcattgggtctttggtggaatagtgtgatggtgaggagcgggatgattctgtttctttgggatgttttgaggaggtgtagggttttgagtattgggaaagttgatatttggggtgctgagggaaaatgagaggcttgccagattccgaacctgatctagctcttcttggaatttcaacaacttttgttcaagctgggatacattctccagataaacctaagtaccatggccattagtggcctctacccgttcagttggattctcctttctgacgttgttcaaatcttccatcttgcctttattcttgtttttgacagaactaagaggaggagtgggtggagggcccctggatctcgtggaataggatgatgtttccagagtgcatgaactaacctttggggaggggaataataaaaacaaaaaataaaaacaaaaggtaatcaaattattgaagaatataggaagtattgcaatatttaaacacatagtgcgggaatgtaaagcgcgtcctaatttggggacctctttgtgcccgaggtaggcctagcgacaaatttatttggagaacttaggatgctaaatgcctcattttattgataaaaagtagacgaatcccaaattgataaataaacaggaaataaaagtcactaatggccatgggccttattacatttataaagcaaaaagataaactcctatctacttggtcccagaaagaccttccccagattcagcatccttggctccgtctaacagcttccccaactcgcgaagtcccagcaacaggtatactctggttaggtgtccgccttcggtccctttcgcattttgacaatcttcgtcccttttgagaaactttctctcaactccactatacctcgctccaagtatcctagtcgcttgttggcactgacagccatgtccttccattcctcaatcagcttctggttggactcttgtatctcgcggtgttcgctttcgcactcccggatccttttgcttagttggttgtatttgacctatgcctcagcactttcatctataatcctgtgaccttgagcaaaccctagctggcccagaccatcatgattgtcttccaaccaaccagagtagaaaggagcgcaactagcatgatacctgtctggctcgatggtatctctccccattatgatcttgtagtgccacatatactgatcttggcacttgtaaggactatcatcattcttgaagtcatcccgaaaatgactcatcttgtcgacccttggtataacctgcttcctaccagcttgcctcataactcggagagggacgtaagggtatgttccgctcagactgatcagtatcaggaaaggtgcatctctagatcgagcgatcaactcctcggttgaaaactactcgaacaaccattggacccattcctcagtcagaatatcaaatagctcaacccatcctttggcatcctccgactgagcaaacatattggggatgtaattcattcgctttggatgatggaaagcgatgtgatcatcccagtccctttgctgaatcacttgttggtattctcccctttggagatgttccatgagccatagttgaagtaataaatttctggcttcaaagtgttttgctcctcgttgatagttgtccaaggctcgatatatgtcttcaatgatcatgggcacgatgttgaatggctgcccaccaattccttccattagggtcttagttaccatagccaacctagtatggattcttgctttcttcatcggaaacatgatcagacccaggaaacaaaacatgaagacgaaaaccctacgatgaatgtgccccaaggatgtgatggcgaactcgtcaaggtaggtatggtaggatttgctgtgaccgtacctttctaacaaataatcacaagggatgtagaattccttcagacatgtcaattctagattcttcttcaaacctatcatttttaggaaacccctgcctttacggttctcaagcatcagtagacccggagtttcccatactagaccggccaatcctcctatatcctctagcaagggtgtcatttcaatgtccccaaagtggaatacagcccttgataatcccaaaacagtgtggcagcttctatgatcttgttgttaggttggatctccaaaaggggtggtagatttcctagatattttcggacgagagtttgatcactagagtgatgatctttccaccagattagcagtcttatgtggatgatggtgaccatgctaaatctagggacttcatgcctcatatttctgcaagacagaaaaggttaggcccttacccccaccagacttgactatttaataccaacaattagcatgcatcatttagttctccaaataaatgcacagaacgtgacgatgtccgtttaggcttagggaaacccagtggactttggtcaaggccatcttaaaggatcattatatggataacatagctggcctgactaggtttgaccatgatgcatgcacaatttgaatagagtaatggtttctatggggttttagactagtacccttgagcggacaactcaagggggaaggcacggaaccgtcgactacaccgctaatcgaatggttttatcgcaaatacgcctttacgaatttagggggtaatgatataggaagagcgcaaccactcattataagcgttgctatagtatttgtttggcacgagtggagtatgatgttgannnnnnnnnnnnnnnnnnnnnnnnnnnnnnnnnnnnnnnnnnnnnnnnnnnnnnnnnnnnnnnnnnnnnnnnnnnnnnnnnnnnnnnnnnnnnnnnnnnnnnnnnnnnnnnnnnnnnnnnnnnnnnnnnnnnnnnnnnnnnnnnnnnnnnnnnnnnnnnnnnnnnnnnnnnnnnnnnnnnnnnnnnnnnnnnnnnnnnnnnnnnnnnnnnnnnnnnnnnnnnnnnnnnnnnnnnnnnnnnnnnnnnnnnnnnnnnnnnnnnnnnnnnnnnnnnnnnnnnnnnnnnnnnnnnnnnnnnnnnnnnnnnnnnnnnnnnnnnnnnnnnnnnnnnnnnnnnnnnnnnnnnnnnnnnnnnnnnnnnnnnnnnnnnnnnnnnnnnnnnnnnnnnnnnnnnnnnnnnnnnnnnnnnnnnnnnnnnnnnnnnnnnnnnnnnnnnnnnnnnnnnnnnnnnnnnnnnnnnnnnnnnnnnnnnnnnnnnnnnnnnnnnnnnnnnnnnnnnnnnnnnnnnnnnnnnnnnnnnnnnnnnnnnnnnnnnnnnnnnnnnnnnnnnnnnnnnnnnnnnnnnnnnnnnnnnnnnnnnnnnnnnnnnnnnnnnnnnnnnnnnnnnnnnnnnnnnnnnnnnnnnnnnnnnnnnnnnnnnnnnnnnnnnnnnnnnnnnnnnnnnnnnnnnnnnnnnnnnnnnnnnnnnnnnnnnnnnnnnnnnnnnnnnnnnnnnnnnnnnnnnnnnnnnnnnnnnnnnnnnnnnnnnnnnnnnnnnnnnnnnnnnnnnnnnnnnnnnnnnnnnnnnnnnnnnnnnnnnnnnnnnnnnnnnnnnnnnnnnnnnnnnnnnnnnnnnnnnnnnnnnnnnnnnnnnnnnnnnnnnnnnnnnnnnnnnnnnnnnnnnnnnnnnnnnnnnnnnnnnnnnnnnnnnnnnnnnnnnnnnnnnnnnnnnnnnnnnnnnnnnnnnnnnnnnnnnnnnnnnnnnnnnnnnnnnnnnnnnnnnnnnnnnnnnnnnnnnnnnnnnnnnnnnnnnnnnnnnnnnnnnnnnnnnnnnnnnnnnnnnnnnnnnnnnnnnnnnnnnnnnnnnnnnnnnnnnnnnnnnnnnnnnnnnnnnnnnataattaaaacatgttggcacatatttgcacgttaaaaaagcgataaatacaacagtttcataatttaaagcagcaataaaggaaagaaacaggaagacatgtcagttttgcagttgaaaaggatattaaatgcttaaagtaattaaacaagtaattgcacataaagaggtacaaattcacaagaacaatccaaaatggtaaaaccctaaaaatccccagcagagtcgccatgctattgcgcccccttttttcctctttgcatcggaaaatcgggtttatgacatttttggggtaggacaactcattccttttgggaactgggtttgcatttgaagggtcgccacctaatgatttaaggtgtattaggacacctatagggtttatttctaagtttgtttgataacatagatagggtaagggcttgaaattatcttaaggggaaggtgttaggcgcccctcaggatccactagtgtggttcctggccagacagttttgtgaattttgtacaattagcaaacagacaaatataggctcaaatagtaggggatttaagtttaaacacataagagtttgaaaaacaactgttaaaaggtgaattttgaaaaggagttacattttacaaatacttgagaatgtaaaaggagggggggtcctaggtttatttattatatggatcacatcaatgcgataccaggtatgacactcatcggaagaggggatacacgtggtattagcgcaccgatcatcatatccacatctacccttcccatccagttaaggtattaaagtgcggattggtctcggcctccccatcccattcctattagtcacggaggaatttagcactactattcctataagagggaggattttaggctgactcttgggttttaaaggtaaaaaggctaaggcgatatacaaaacaagtagaactgcatattagaggaaacatataaacaaataagaggcttatatatacctctgcaaaaatgcacataaatagcatgacttaaacacagttagagtcagaatttaaagtactaaggcacggcattttaattgttgaagtagaccaatttattacataactcagataagaagccccaatcatgcctgcctgctagttgtagcagttgttaattaaacaaaggcggattcagttttatcattaatacctgaggcttgcctaagtgtgtattggtaatgtcctataagcatgatatctattactgattaaaaaggtaatagagcagtggttaatttttaaacaggcgatttggatcctataggcatgctttctaaaccgcattaatgaaaggaataggttgttcaaaatgattttgaacagtatgagtcaaactgattttttactaaactggtctcagatcctatagacatgatctctattatcactgattttaattcctaccagcatggtatctaaatattaatggctgatttgggtcctataggcatggtatctagttgaatgtgaagtgaaacatgcaggatttatttgatcacaacgaaattcctatagtcatgacttttataaaaatattgattttaattttataggcatgacatctaatttcaaagcttattttaaccttgtaggcatgatgtctaagtgtggaagtaaaacatgcaaaatttattaaacagatcctataggcatgttatatacccttctaatagctaaatcatgcataatcaccccatccctttttactagccagccctccaatatttgttacaaattattatagaccaaaaatgcatgagttacatcagaaaagtgcaaaaacaaggagttacaaccataggaagcctgattcttgacttcctctctgagttatggaataaactacctcaaaagccaatgttatcaaagcttttctcagacctgggtttgtcaaagttccctaagggtctcaagggaccccgggcagtgcttacactcaggttgcataaccagacatagatgagtgcagtgtggaagggctagcccttatgtgtccaagttcagagggagctcaaggtttccaagtcaaggctcaaacaagaggggtagaaccaaggttataagattatagtggaagtgcagaacatagttgaaagagatttatttaaaactgggttgggaactagcaagtggtaagggtgatttgaaaatagtagtagtaaagctcaaactgaacagaataagtaattacacaaaggggtcaagggggttttgggaatacattgtatgaagcatatgaccccagaaagggtcaggtttgattcatgcacaacaatagataatgctggcatacccacaaaccagccagagaacacaaacacatacaggggatatggggttttgggattcataagtcatcaaatcacataacaagtgactgacagagtacatacataagggaaacattaatttaaaaggggagggagcatattacaacatgctagtaatgtaacttgattgcataaacataagcagaagtaggcaagagtgaaaggaactaagacaactaaagaaacatgttgttgttgatgcttgaaaattaactaggacataccagtagagaaacaaagtgcagaaagaaagaaataagcaagattctacagtctagccttggactttcatgcggctagacaaagaagtagcacaagtagcagtaaagaaaagagacaatgttttgagtgtaagtgtgtgttcttgggtgaagagtgtttatagtttttgaaaatgagtgaaaagtaaggtaataagtaaagtcttaacacaaacatggaaacaattagatcagaatcaattaacataggtagttccctttaattaaggaatcactatttgacgtgtaatagcaagtttatttaaggaaagaaatcataaaagaaaagcctttgcaatcagtcaaaaggtcaagaccaatcaaaggataaacatggttctacacttaagtatataaatagagtgaatagaagcatcagccatgcgaggccaaatacattggcaaaatagataatacaaacatatagtagtggcaaaaataatctaggattcagtagtaagaaaaaatattcgaagtacagtagtcaagtaggtctagtagtcacataaaatcaacagtgaagaagaacatagtatcaggtaagagaaatcggaaacaagtatgtgagaaaaacttctaagaaatttagggcttcaacagtagtcgagtttaacaaatgaaaagaactcaaatcagacaagtctaacaaggaaaagagagtcataaacgaagaacttaagataagcacacatttaagcaaataatttcagaactcggataagactaaaagaactagggttttgaacatgctgactcaagtagaaggaaagcataaacaggtaacatagcaaaatcatgaaacaacaccaaaatcagagaagagatctttaaaagagnnnnnnnnnnnnnnnnnnnnnnnnnnnnnnnnnnnnnnnnnnnnnnnnnnnnnnnnnnnnnnnnnnnnnnnnnnnnnnnnnnnnnnnnnnnnnnnnnnnnnnnnnnnnnnnnnnnnnnnnnnnnnnnnnnnnnnnnnnnnnnnnnnnnnnnnnnnnnnnnnnnnnnnnnnnnnnnnnnnnnnnnnnnnnnnnnnnnnnnnnnnnnnnnnnnnnnnnnnnnnnnnnnnnnnnnnnnnnnnnnnnnnnnnnnnnnnnnnnnnnnnnnnnnnnnnnnnnnnnnnnnnnnnnnnnnnnnnnnnnnnnnnnnnnnnnnnnnnnnnnnnnnnnnnnnnnnnnnnnnnnnnnnnnnnnnnnnnnnnnnnnnnnnnnnnnnnnnnnnnnnnnnnnnnnnnnnnnnnnnnnnnnnnnnnnnnnnnnnnnnnnnnnnnnnnnnnnnnnnnnnnnnnnnnnnnnnnnnnnnnnnnnnnnnnnnnnnnnnnnnnnnnnnnnnnnnnnnnnnnnnnnnnnnnnnnnnnnnnnnnnnnnnnnnnnnnnnnnnnnnnnnnnnnnnnnnnnnnnnnnnnnnnnnnnnnnnnnnnnnnnnnnnnnnnnnnnnnnnnnnnnnnnnnnnnnnnnnnnnnnnnnnnnnnnnnnnnnnnnnnnnnnnnnnnnnnnnnnnnnnnnnnnnnnnnnnnnnnnnnnnnnnnnnnnnnnnnnnnnnnnnnnnnnnnnnnnnnnnnnnnnnnnnnnnnnnnnnnnnnnnnnnnnnnnnnnnnnnnnnnnnnnnnnnnnnnnnnnnnnnnnnnnnnnnnnnnnnnnnnnnnnnnnnnnnnnnnnnnnnnnnnnnntatcgaaaaaaatgaaaagtcattttgaaagaaaaattgaagaaccttcgagaaaacacttaagaaattcataacagatctaaggtagatctgaagaaaactgaaagatcttaaagattagggtttcaaaaaatccagaaaagctgagaaagaccttgaaagttaccgatctaactaggaaagtcaaggatctaccttgaaaggccatgaatgaccggagaaaggtcatggatggccggagaaaggccataaacagaaattgagcaaggactggaccagattcactcgaggtctaaccatgaaaccacagaaacaaacacctaggagccacaggaggctaatacacatctcaaatggccatgagaggctattgattcggcaggggttgaagtggattagggtgggattagatggcggcggctagggttcatgagggattgcagagagagttgagagaagaaggattcaagggcagcgtttggtgaagaatgaggtagggtaaggggtcttttggatttaattatggaagggcgaatggtggcagttgatctgagtgatcaacggcctggattcaaaatggtaggtgggggaatccgggttgggttttttaattgggttaggggtcgggtttgaatgggaattggtccggagaaattgggtttaatttggggtcagatataggctaaaattgaaatgtaactcggctattattgaaatagccaattttccacttttaaaattataaaaaatagtaaattaatttctgaaaataaattgagagcactaaaatgatttataacatataattaacaatttaaaaatacagggcttaattttatgaatataaaacacaattgaatcttaaaagggccaatattgcaattatatgcaatttagcttaannnnnnnnnnnnnnnnnnnnnnnnnnnnnnnnnnnnnnnnnnnnnnnnnnnnnnnnnnnnnnnnnnnnnnnnnnnnnnnnnnnnnnnnnnnnnnnnnnnnnnnnnnnnnnnnnnnnnnnnnnnnnnnnnnnnnnnnnnnnnnnnnnnnnnnnnnnnnnnnnnnnnnnnnnnnnnnnnnnnnnnnnnnnnnnnnnnnnnnnnnnnnnnnnnnnnnnnnnnnnnnnnnnnnnnnnnnnnnnnnnnnnnnnnnnnnnnnnnnnnnnnnnnnnnnnnnnnnnnnnnnnnnnnnnnnnnnnnnnnnnnnnnnnnnnnnnnnnnnnnnnnnnnnnnnnnnnnnnnnnnnnnnnnnnnnnnnnnnnnnnnnnnnnnnnnnnnnnnnnnnnnnnnnnnnnnnnnnnnnnnnnnnnnnnnnnnnnnnnnnnnnnnnnnnnnnnnnnnnnnnnnnnnnnnnnnnnnnnnnnnnnnnnnnnnnnnnnnnnnnnnnnnnnnnnnnnnnnnnnnnnnnnnnnnnnnnnnnnnnnnnnnnnnnnnnnnnnnnnnnnnnnnnnnnnnnnnnnnnnnnnnnnnnnnnnnnnnnnnnnnnnnnnnnnnnnnnnnnnnnnnnnnnnnnnnnnnnnnnnnnnnnnnnnnnnnnnnnnnnnnnnnnnnnnnnnnnnnnnnnnnnnnnnnnnnnnnnnnnnnnnnnnnnnnnnnnnnnnnnnnnnnnnnnnnnnnnnnnnnnnnnnnnnnnnnnnnnnnnnnnnnnnnnnnnnnnnnnnnnnnnnnnnnnnnnnnnnnnnnnnnnnnnnnnnnnnnnnnnnnnnnnnnnnnnnnnnnnnnnnnnnnnnnnnnnnnnnnnnnnnnnnnnnnnnnnnnnnnnnnnnnnnnnnnnnnnnnnnnnnnnnnnnnnnnnnnnnnnnnnnnnnnnnnnnnnnnnnnnnnnnnnnnnnnnnnnnnnnnnnnnnnnnnnnnnnnnnnnnnnnnnnnnnnnnnnnnnnnnnnnnnnnnnnnnnnnnnnnnnnnnnnnnnnnnnnnnnnnnnnnnnnnnnnnnnnnaaacaatatgcaaaagttaccttagctatatcatagtataaatataaaattccaacaaatgaattaccaaaataatattttggaaacaattattagtttttttatggataaaagagggaaataaattgatttaaaaacctttaaaaattatgaaaaaataataaaacacttggatatgcttacatatgcatatatatgtcattttgaagttatttttcatattgaaaatatataggaaaaaattgaatgtcaacagtatttagaccacgtcagtataaatagggccttcgagggctgccacgtattaccaatgtaactttaagaaaaaacagattcaaggtcgaagtcatatgacaagagatgaagggctagatcgaggggttaacagagatcaaggtcgaggacaaacactctccttaaacagagtaataatggctagttttaggataagactttaaaaagaatatttcacagaatattttctggatctgtactattagggttttgtggcacatgtacccttataaatagaaagagacatagttataggggataatgaacacccatttgtaaaacaacaacactttgatattctttgagattttttctttattacatatatataaaagatacctttttcttgagatccctgcctagattttttcccacgatccaaggaaaatatgaatattcaaaggcttatcaatcatttatcattgtcggaaggaatattagacagcttcattccctttttcggtcacctctgtcacatatatttacataaataccattatacatcatttattgctactgaatgttattcacttcatatttgtgccattaagtgttgttcattattatatatttatcactgttaccacatatcttgtaacattttatcacgacactagttaaacattctaagggatattattattggctaacattaaccccaccttgttaaaaaatctaattgtttaaacttgatctaaattttggtcaaaacgtttggcgtcgtctgtggggatttcttagctaatcttttagtttctattaagtctaaaactcaagtgactttctaacctaagaggccacaaattttttctcctctctgcatgcacaaacatttccctggaaagtaaccaaggaaaagggactagggcgacatgggacataccagtaacctcatgagctccatcaacgagagctatgaaatacagtgcgaggatatgacgcccactgcctcccctaggcgtgagaagtcatctccccttattgcaacacaatgaggctaaacagaaaaggatcttccatgtatacgggagaaaggaagccacctgcaatgaaaaaacccctcgaagcatgactaactgataccctagtaagcgtgctcaaaaaacaagctccatgcacgaccatagaaatcacaagagcccacatggtacaacgaggggacgaacatggcgatcaaccagaccctccaactctaggtataacacacaatgttactgacagtgcagatgacaacgtcctcgccgctattttgaaaagaatggaagaaatggagaatgaaaataagacgctcacagaccaaatgaaggaacatggggagcgagtagacaagatatcgggtgcccctaagttaccgccaaaaagggacgtcggtaggtttgtagagtagccatagcgaggaagaggccctacatgccataccaaataccttcaaaatgccactgtatctctaatatacgataggacaaccgacctcgaaaaccatgtgactcattacgtcaccgccataaagggcaacgacctcaccaaggaacaagtgtcctccactttgttgaagaaattcagtgaaaccctccctagaggggtattaacatggtattcacggctaccagcctgctccataaaaacgttcgaaaaaatggctgacaagtttgtgatggcacatgttggggccaagaaaatcgaaacgagagtaaacaacatcttctccatcaagcaatccttaggagagggactgagggacttccttacccgattcaacagggtaaggatgaccttaccaaatgtatccgaagggattatagtcacagcctttaagaatgggttgagtagatagggttcaagagcgacaagatagctgctgagccaattgatgaagtatcctccaacgacttgggatgaaatccataatacctattgtgctgtagtccgagcatatgatgacgacatcaatggaccaactcgatgactcatcttgatacaaactgaacctaggaaagaataaagagataacatgaggagggattttccaagcaccgcgtccggcgaacgttggaaatcagacctgccttcggggctgcgggagatgatatcctccaccgagggaaaagtttcattctttatggtggtagctgcattctccccttgattagggaacacaaccaccaacggaacaatgtggctcccttcatcaacatcagatgatacatttgacatctttatgagaaagtaaagacggatactggaaagagagtttaggatgcgaaagaaggaaacaatgcataaaatagaggttccaaaaggatgttttaagtctcaaagtttggaagaataaaagattcaaattcaggtttggccatccctacatatagagattgaggcaccgattccgaaatggttgtcataatgggcaccaaatctgaaatggctcatcataattgacaccggaactaaaaccacagatccaatcaaagtgctagcttgagtaagtttgttttgatgattgacaaaggaacacatgcatgaatcaggtccaaggacagtgtacacatgtgatggattaaataaagcaaaaggcttgcacttgaaagagataagtataagtggttatatctaatattccttgaacgaaaaggttgcatatttgataaggagcaggactccttacttgaagagaactctatccaagataagagaagaattataagttgaagttgactagaactcttttaccaaggaagagtaaagtattagaactctagttaatctttatttactaattctataaatattagtgttgttttcttttacaggtgatacacacatacttaagtaaaaagnnnnnnnnnnnnnnnnnnnnnnnnnnnnnnnnnnnnnnnnnnnnnnnnnnnnnnnnnnnnnnnnnnnnnnnnnnnnnnnnnnnnnnnnnnnnnnnnnnnnnnnnnnnnnnnnnnnnnnnnnnnnnnnnnnnnnnnnnnnnnnnnnnnnnnnnnnnnnnnnnnnnnnnnnnnnnnnnnnnnnnnnnnnnnnnnnnnnnnnnnnnnnnnnnnnnnnnnnnnnnnnnnnnnnnnnnnnnnnnnnnnnnnnnnnnnnnnnnnnnnnnnnnnnnnnnnnnnnnnnnnnnnnnnnnnnnnnnnnnnnnnnnnnnnnnnnnnnnnnnnnnnnnnnnnnnnnnnnnnnnnnnnnnnnnnnnnnnnnnnnnnnnnnnnnnnnnncacaaattgagagcaaaatagcaaggcattttgtgagcaattcctgtgagatttatgagtgcgatcttgatgttacacgaaccagattgaagaaccagctccataaagagttttatgtgtctttctttatttctagttcaaagtgtagtaggcgttttaagttatacctttcagttttctaagaagcaaattatactaggtacctgagttnnnnnnnnnnnnnnnnnnnnnnnnnnnnnnnnnnnnnnnnnnnnnnnnnnnnnnnnnnnnnnnnnnnnnnnnnnnnnnnnnnnnnnnnnnnnnnnnnnnnnnnnnnnnnnnnnnnnnnnnnnnnnnnnnnnnnnnnnnnnataagggttagagttaatccttaggtttgcaagagtttgtaaactttgtggttggctcagagttgtggtgaagtgtttggagaaaatcctactgggtagtaaatcgtggttattactccccgcagtattatgtcgatattaggacctgtaatattatatgaagacgatgttacaccctttagtattatacatgaaattatcataagataattgacctcagtttaaggacaagattctttggtgattataagcattaagctatttcaaacaagtgatggataaatttgtgaagatgagagggcaagcaaatcgaagaaaataaattttcgtcaaagtttgatattttggaataaaatacgggccgagctaaaataaccggtacttatggattaataccatctaagttaccatatgaccgtgatagtaaggtgcataaggtgtgttaaaagtgagtatcaatctaagtaatttgagataaatcttaattatgtggattattggttaatggggagaatttgcaagttaattaaaattagtgggtaattaattattaatcttgggataagacttagacccctcccccccccccaacttggtaagccttctttatctatctaatgactattactgaaggtggaaaggtgtcacactttgagaaaggaaagtgacaccaagcttggaatgtggggcctacccaaaaattaaagataacattcataattgaacaatattttctaatctcttaagaagaattttagccaaactttccattacataacgttaattctaaatatcttgagaaagagtttcaacaaaaataattttgcaatagcaacgttttggctttgagcatttcatacggattgtttcctattttgatctcgccattacgtgtttctttacaatcaacgtgtgttggaggaattgtcaatagaatcagataaggtatgttaaagctaagcccttccttcattttgacatgatctcattattacatatggttgataaagaggcataaagagaagttcatgctcccgaatttatatacattatcctagtctcataagttacagtattctaccttattgggacttcatattctattgagtattgtctttttccagtcaagagagtagagagcctatagatacagtattacagtattttcattatcgttgagttataatgtcacgatcccagttctccctccgtgaactatcgtgacggcacctagtctctatgactaggtaagcctaacaaatgtagaaaagaaacaattgtggaaagaaaataattaaaaaccgagataacaaagtgaaacagtgtttaaggtgccgttcggcatataacagtacaagaatctcaacctaacactcccaaaatctagaaccccatgaatcacaagctaagagattacataaaaagctctaagtccagaaatgtctatcaacaaggaaaatacagaagggctatactagtactgagaatagaaagggactcttcggtctgcggacacagcagatataccttggagtgtctacaacagcacctcgcctaaagtgtgataagactgagtggaaatacctggatctgcacatgaaaaacatgcgcagaaagggcatgcgtacaccataacggtactcagtaagtgccaagcctaacctcgatcgggtagtgacgaggaaagtcaaggccctattgagattaaatgaaatataannnnnnnnnnnnnnnnnnnnnnnnnnnnnnnnnnnnnnnnnnnnnnnnnnnnnnnnnnnnnnnnnnnnnnnnnnnnnnnnnnnnnnnnnnnnnnnnnnnnnnnnnnnnnnnnnnnnnnnnnnnnnnnnnnnnnnnnnnnnnnnnnnnnnnnnnnnnnnnnnnnnnnnnnnnnnnnnnnnnnnnnnnnnnnnnnnnnnnnnnnnnnnnnnnnnnnnnnnnnnnnnnnnnnnnnnnnnnnnnnnnnnnnnnnnnnnnnnnnnnnnnnnnnnnnnnnnnnnnnnnnnnnnnnnnnnnnnnnnnnnnnnnnnnnnnnnnnnnnnnnnnnnnnnnnnnnnnnnnnnnnnnnnnnnnnnnnnnnnnnnnnnnnnnnnnnnnnnnnnnnnnnnnnnnnnnnnnnnnnnnnnnnnnnnnnnnnnnnnnnnnnnnnnnnnnnnnnnnnnnnnnnnnnnnnnnnnnnnnnnnnnnnnnnnnnnnnnnnnnnnnnnnnnnnnnnnnnnnnnnnnnnnnnnnnnnnnnnnnnnnnnnnnnnnnnnnnnnnnnnnnnnnnnnnnnnnnnnnnnnnnnnnnnnnnnnnnnnnnnnnnnnnnnnnnnnnnnnnnnnnnnnnnnnnnnnnnnnnnnnnnnnnnnnnnnnnnnnnnnnnnnnnnnnnnnnnnnnnnnnnnnnnnnnnnnnnnnnnnnnnnnnnnnnnnnnnnnnnnnnnnnnnnnnnnnnnnnnnnnnnnnnnnnnnnnnnnnnnnnnnnnnnnnnnnnnnnnnnnnnnnnnnnnnnnnnnnnnnnnnnnnnnnnnnnnnnnnnnnnnnnnnnnnnnnnnnnnnnnnnnnnnnnnnnnnnnnnnnnnnnnnnnnnnnnnnnnnnnnnnnnnnnnnnnnnnnnnnnnnnnnnnnnnnnnnnnnnnnnnnnnnnnnnnnnnnnnnnnnnnnnnnnnnnnnnnnnnnnnnnnnnnnnnnnnnnnnnnnnnnnnnnnnnnnnnnnnnnnnnnnnnnnnnnnnnnnnnnnnnnnnnnnnnnnnnnnnnnnnnnnnnnnnnnnnnnnnnnnnnnnnnnnnnnnnnnnnnnnnnnnnnnnnnnnnnnnnnnnnnnnnnnnnnnnnnnnnnnnnnnnnnnnnnnnnnnnnnnnnnnnnnnnnnnnnnggtatgacagtatagaataagacagtaaaaattaagtgcaacagtaagaaataacataaaatagaaagaacaacaacaactataacagagacaaaataatcacgaaaaagagtacaactcaacacagagataacatccagggatctctcagtatcccgaggatctcttagtatcttcaatatgtgtgccagggatctcttagtatcccgaggatctttgagtatcctcaatatgtatgttggggatctctcggtatcccaaggatctcttagtatcctcaatatgtattggggatctcttggtatcccgcactacagtccaaatcgatatatatgtgtaggggatctcccgggataccgtcctgtagtcctaaagtaaacacgcagtaacaacacgaagaatactcaattaaattcaatttcacaccaaggtaacaagtatttctaacataacatgcttcacatagtccaaataaggcagtttgagaaaataaaaacaattaaggcaattagacatgattctctaagctaacagcatgcttgattgcaagtagaataaacaagaagggaaaacacaattaaagttacttagtgaaaacaagattttcaacgattagcacaagtacgcactcttcacctcacgtgcaaggaatttcaaatatcaataataccaaatattaaggggagttccccccccccccacaaagttaggcaagccacttacctcgaacaagctcaaaatcaacccgaaaccaggttcttgccacaagtacttgactccaaatggcccaaatctattcaattcaattgcataatataaataagacttcaaataactgattttataaacaaattctaagctaatatgcaaaattagataaaatgaccaaaacgccccctcgggctcacatctcggaatcggataaaaattttattttcagaatcctcatactctcacgagtctaaccataccaaaacttgaaatttatgtctaagaactttctccaaattttcccccaattttcatcccaaatccgaaattaaatgacaaatctaagattagattataggaatacaactagaaagggattaggaatcgttacccacttatttcttcttcaaaatcctctgaaaatcgccatctcccaagatccaaatcggtgtcccaacttttgaaactaaacccttgaaattcttattttctgcctagtaaatccgcatgtgtagtcaaaattcccgcttctgcgctaccgcttctacgattgagggaactgcttctgctgttttcactaaaacctccatctccgcacttgcgacccatattccgtatctgcggtcccgcaggtatggtaacccttccgcttctgcggtatctgctgccttcacttgtggccacatctgcgtctctatgctctcttcttcgagtccacacctgcggtcccctagtcgcaggtgcggttatgacagcaatggaaaaacttcagctgccaaaccaaactaaaaaaccccccgttaaccatctgaaaccaccccgaggcccccgggacttcaaccaaaagcacgaacaagttatataccactatccaaacttatacaaaacttcaaaacacctcaaacaacatcgaatcaaccaattaaccatagattcaagcctaagaacttcagaaactctcaatttatgcttttgatcaaaaactctatcaaacctcgtccgaatgacctgaaattctacacacacgtcacatccaacactatggagctactccaacttccgaaatttcattccgaccatgatatcaaaatctcactatcaaaccgaaaacttcaaaaattcaacattcggcatttcaagcctaatgaggctacggacctccaaaacataatccgaacacgcccctaagtcctaaatcactcaacggagctaacggaaccaatgaaattctattctgaggccgtctacacactgatctgactacgatctaatttctagaacttaaactctcatttagggattaagtgtcctaaaaatacttcgaaactcaaaaccaaacatcccgacaaataaaaatagatgaaaacacggtgaaagcagttaatatgggagcgggcgttaattctcaatacgactagccgggttattacatataatcggtggacagacctctattgggcaacctctaatcagatggtaagttatataccgatcctactgcggctgagcggctatgagcgagcctagttggccgagatacagatcctagtatggttgagcacctatgagcgagcctactacggcagagcagctatatatatgccaaaccttataaggtcggatagctattttacttactatattgagagagttgagccagtatcagcaggtgagcatatcttcagattatctttgactcccagttactttaagttattatattatcaattcagtttcagctttcataatattgccttacatactcggtacattatttcgtactgacgtcccttttttgggagcactgcatttcatgcgtgcaggttcaaacagacagagaggtagacatccccattaggtgttgcccaagtttaacttgatcggtaagctccatgccctttagagttgtcgggtctagagctttacgtacatcttgtgtatatatgtatatatgttatgagtagctcggggccctattatgatcatagtatatccatcagtagaggcctgtacatatatcctgtcagttagtgtggtatattgggcttgtaggccttgtatgtatattttgattggttttccagctgtagtagttatgatagttttgtcggcccaacattatgttgatgtttagttagcatttgcaaattgtcttgcaatgtggcccatggccaaagtatgacattatatgttcaaagtcccttagtcgcaagtttgtacacaaggataggtgaggcacctcgccccccaggttcggggtgtgaccgaagtggtatcaaagcagttctgtcctatggagtctacaagccatgtctagtagagtcttgtgtttgtttgtgtaggtccactgaactatacagtacctggtcctctacaagattctgctgagaatgctaataaaatagtatgtaaatgaggtagaggatttttacgtgaaaaaatcccacacatggagatcaaaaaaactacgacttacacatgtaggcttttaacttcactaacttgtaatctacctattataagccactttacaataattcctgttgtaaaggatttactcaaataacttgtggtactcttaccacaaatcactttgtgacttcctagtaacaaagtctttttctaacttgtgatgctctcaccacaagccactttgtaactctacaattacaatgacttttccttataactaaatctagtcacaacataaactcaaggagtttatggattttcaagaggattcctaatcaaatgcttctaggtaagcagtttaggagataaaataagtatagtaacaaggttacaactcaactaggacaacaacaagctatcttttaggaaatggtccgtagttgcgttcaaccttattcttcaagcttgtaaggattgatttctctatttttgcaagaggcttgaatgagaaacagaaaccttccagtgttgttttgtataaacctcattgtgggtacatcttgatcacatcacttgaaatgatgtgagtactttgttttgttagagaatgagtgggaggacagtgcagtacggcagaaacagtgacgccagtcacttcatttctagttgtgtccaattgactctgtacagctatgacgaaaccacaagagcatcaggtccttgtgtgggtttctagctcctgaagctgtagcagttcacctttagctggaatacgttaaagcttgcagcaatccaagtaggtcaggttccctatctagttcttaacagtaagtttgttagattatcaaaacataaggcaagagtatttaaaatatatcaatttcccctttttgatgatgacaaacttaacatttataaactggaattagggcagtaccagttttaaagtatcagggaacacagagagttccccctaagactatgccttatcttttacatgatcagagtagtaagaactagttcctccatgtgtgttccccctgattattatttttttccttcttttggcatcattaaaaaaataacagcacaaagaagtccagtgaagctaactcatgccacatatgtgcacacaatcatgatagagaatagaacacatagagtactgacataataaaactagaattaatattaataacgatttaatatacctctgcctatgaaaaaggctagaggcaacatttggacttgctaacgggagtagtaatgtttcctcccaaccatcaaaaaaagaaaacaaaaaaacatccgccaaaccatcaacaatgaaacaaaaacataagaaacatatccagaaaactggtcactaaaggggtactttagggcactaggagtaaaaggattggtagcagcagaaaatgcctggagaacgaggtctattaaggtgtttgccgacttttgctcgttgagcagttccgccttcaagttctcaacttgcgccctgagattagcattctcctgtgtcaaacaagccacttcatcattcgacatgggaaccccttgggcttgctgatcttccaggataacattcatggccttcaaccgatgaatttcctcagctgcactgttttggacgttgataagctgagaaacggttgatgtatttcctactcctcccccccaatacttttccacacactcacactcttccaaagttgtctatgagaatgtccgctttcgagaccccactttacctattcccagtggaactttaaagaatttgaacactggagtaagaaagaatccatagggaagtccatgattaccgtccttgaaggtggaaaccttttgcatgtgttcgatcataatagcaggaagaatcataggattgaaaccgtcaagttgctccattaggaataggtcagacttagaagtcactaacctcctttcggctcgaggcaacatgactttgttaaccaatttaaataacaactggtaaacagggagtagtgctttcttatggatctagtcccctttctgattagcattttctttcaccattgcatttctgaagttatactgacaaacatctcgtacactcaacaccctaactgtaggaacttttaaaatctctccaagcaattttacatcaaacacgatgtccaccccattgaccaaagcatagacatggtcagtatcaactggaaagaggctagcaaagaaactttgtacctcctcctcatacaccttaggtgcatccatgtgaaatagatgcacccaacgttgaaactcgaccatttccagaatttggcgcattccagccatatcagagattgttgggtcaaacatacgacccaatagaactttttgatgcctcaaaagctcagagccaaggctgacttcacttctcattttcttcatagaactaggttcgtcaaaagattccgacttgcgtttcccaaacttctctccactgactttgccttttgccttagacttaactagtacatcctcatcagacatagaaaactcactcactacctccttctttttggacttagatgttgaccctttctctattgacacaggctttgtctttttcaaagatcgcctaacaagtgaaccgggttcctctggagttccctcttccacctcgactacaaggatagcctcatcacttacaggtacaccatccttcaccaacttttttctttttttttcttactactcttcttgctcgtttggagagtagagtcgtaggccactttgacttgaagcgtggtagtaggtcgtttgatttcagactcaagggtggacgcaacccttcgcttacttatgaatgcatcaagagccacattatccaggtcttattcatcactagatcgtatttcaggtgcttgaattcccaggggcacaacatcaaatgcaggaatagtactgtcctagggatgagagccctaacctgggtcctccggagagggatcaggttcctcatgtgatgccccagtagtatctgctattgcatacccttcaatagccacaatggccccttattcctccacatcgtgtatctcatttttttgggatgtaatttcatgcaataccccatcagtggatactacaaacatagttacaacatctttcttttcttcaaccggtgcttccaaaaccatgaaatcggtggcaacgatttcagaacccttgtgaactcagtattttgaccttgttctccacttagggtttgattggtgggaacaacagacgatggggagaacaaaatagtagttttaaaggtttctgagttgggaagatattgggaaattggggaaggtgtgactgcagcagcaagagtggtagagggtgaggaaggctcagtcaaaatgaaaggttccatatatgggtcagtggtgtagaacctgctcatctccatagaggcaaagagatcggaagttttttcagccattgaaagaagtggtgttaggatccttcccttttgggtgattctagtgtaggacttatggttaagaagagcagaagagaggggttttaaaaggagaggataattataaagggaaaggaataagcacttgttctgaaacggtggttgggcatggagaattgcaatgtttcagagggagatggaacattttgaattgaaaggacgtgacagcaagatctaaaaagttgatgacatggcagttgtattttgtacccttagacgtgtattaaaaggatgcatagaactactaacctttagtacaagaacctagttcttgaaaaaaaattcttctctttttttttgttttgaaagaaatcaatcctctttcatcaatcttgcattgcatctatttcctctatgctcatcatgtgtgtttacctgcaacggtattgaagtgagttagacatggccagaaaacactttgagccagttatttcttaaggataggtgccaaccaaagaggaaacaggttcttaatttggcttcaacagtcccagctttactatgtttctttcaaactgttccctacttagtgccttggtgaaaatgtctacaatttgatcttttgtgctacataacttcatacatatcaaccctttctccacgttatctctcagaaaatgatgcctcacatcaatatgttttgtccttttatgttgaactagattcttggccatatcgagtgcactggtgttgtcacatagaaggggcacactctcagtgagtaccccaaaatcctccagttgctttttgatccatagaagttgagcacaacaggatgctgtagctacatattcagcttcagctgttgacagagccactgaattctacttccttgttccccaagagataagacatgaacctaagaagtgagccattccagaagtgctttttctgtccacaagataacctgcatagtttgcatcacaagataacctctatacattgtttgattcagaggagatccagtttcatccatgtctagtcgagtggcagttgcaatgggagtgtctatcacctttgatgcttccatgttaaacctctttaagagttccctgatgtatttttgctgacaaatagaagtaccgtttggggactgttttactcgaagacccaagaagaggtttaattctcccatcatgctcatttcaaattcacttcccataagttttgcaaattcttcacatagagagtcagttgttgctccaaaaatgnnnnnnnnnnnnnnnnnnnnnnnnnnnnnnnnnnnnnnnnnnnnnnnnnnnnnnnnnnnnnnnnnnnnnnnnnnnnnnnnnnnnnnnnnnnnnnnnnnnnnnnnnnnnnnnnnnnnnnnnnnnnnnnnnnnnnnnnnnnnnnnnnnnnnnnnnnnnnnnnnnnnnnnnnnnnnnnnnnnnnnnnnnnnnnnnnnnnnnnnnnnnnnnnnnnnnnnnnnnnnnnnnnnnnnnnnnnnnnnnnnnnnnnnnnnnnnnnnnnnnnnnnnnnnnnnnnnnnnnnnnnnnnnnnnnnnnnnnnnnnnnnnnnnnnnnnnnnnnnnnnnnnnnnnnnnnnnnnnnnnnnnnnnnnnnnnnnnnnnnnnnnnnnnnnnnnnnnnnnnnnnnnnnnnnnnnnnnnnnnnnnnnnnnnnnnnnnnnnnnnnnnnnnnnnnnnnnnnnnnnnnnnnnnnnnnnnnnnnnnnnnnnnnnnnnnnnnnnnnnnnnnnnnnnnnnnnnnnnnnnnnnnnnnnnnnnnnnnnnnnnnnnnnnnnnnnnnnnnnnnnnnnnnnnnnnnnnnnnnnnnnnnnnnnnnnnnnnnnnnnnnnnnnnnnnnnnnnnnnnnnnnnnnnnnnnnnnnnnnnnnnnnnnnnnnnnnnnnnnnnnnnnnnnnnnnnnnnnnnnnnnnnnnnnnnnnnnnnnnnnnnnnnnnnnnnnnnnnnnnnnnnnnnnnnnnnnnnnnnnnnnnnnnnnnnnnnnnnnnnnnnnnnnnnnnnnnnnnnnnnnnnnnnnnnnnnnnnnnnnnnnnnnnnnnnnnnnnnnnnnnnnnnnnnnnnnnnnnnnnnnnnnnnnnnnnnnnnnnnnnnnnnnnnnnnnnnnnnnnnnnnnnnnnnnnnnnnnnnnnnnnnnnnnnnnnnnnnnnnnnnnnnnnnnnnnnnnnnnnnnnnnnnnnnnnnnnnnnnnnnnnnnnnnnnnnnnnnnnnnnnnnnnnnnnnnnnnnnnnnnnnnnnnnnnnnnnnnnnnnnnnnnnnnnnnnnnnnnnnnnnnnnnnnnnnnnnnnnnnnnnnnnnnnnnnnnnnnnnnnnnnnnnnnnnnnnnnnnnnnnnnnnnnnnnnnnnnnnnnnnnnnnnnnnnnnnnnnnnnnnnnnnnnnnnnnnnnnnnnnnnnnnnnnnnnnnnnnnnntgaacgatgagcaggttccttcctcgtttttttaagaaaatagtgttgtcaatttttcctcttttaaaaccattttctaagaggaactttgacagtctttcataccaagctcgaggagcctgctttagcccatacaaagctttgtccagtttgaacacatattcagggtgctcgtgacattcaaaccctaagggttgcttcacatagacttcatccttaaggagttcattcaaaaatgcactcttgatatctatttggaacaaggtgaatattgtatgagatgcaaaagcgattagaattctgataaatcccatgcgagccactggagaaaacgttttatcatattcaaccccttcctcttgattgtagccttggactactagcctggccttgttccttgtggtaactccatgttcatcgagcttgtttctgaatacccacctggttcctataatggtttgatctggggttctaggtaccaggtgctacacattgtttctctcaaactaatgcaactcgtcttgcatggctgtaatccaatctgcatctttcaaggtttccttgatatttttgggttctatctgggagagaaaggctgagaaggcaagtaaattttggctcttgatctggtttgtactccagaatctagaggagtgatgatgttatctatagggtgagagctttggtgtctccagttagacgcccaaggttcattctgagaggaggaaggtatgtttggctgattttcctctatccttctctcagatgctagaggagttccctaaactgcatcaaccacccttttttcagcttcagtggttgtaattgaagtgcttggttctgcttatgatgaggcagcgttgtcttcatttggctcctttacttgactcatcatatctactttttcgtttgtcatgttaatgccttcaccaggaacaagtaagggttctccatcttgatctttctcagcactcttctcaaatgatggatatgattcatcaaaaataacatggatactttcctcaacacattgagtccgcttgttatatattttgtaagccttgctttgagaggagtaaccaagaaatattccttcgtcacttttggcatcgaatttaccaagatgatattttccattgttgagaacataacatttgcatccaaatgttcttaggtgaatcagcttgggttttcttccattcaacaattcatatggggtcttgtttagaagtgatctgatcacgcacctattcactaagtagcaggcagtgttgacagcttcagcctagaagttctttgcaattccactgtcaaatcagcattgttcttgccattttttctagagttatgttctttctttatactactccattttgctggagagttttgggagctgagaagttgtgagtgatgccattttcattacagaattcatcaaatttgacattgtcaaattctgtcccatgatctgatcnnnnnnnnnnnnnnnnnnnnnnnnnnnnnnnnnnnnnnnnnnnnnnnnnnnnnnnnnnnnnnnnnnnnnnnnnnnnnnnnnnnnnnnnnnnnnnnnnnnnnnnnnnnnnnnnnnnnnnnnnnnnnnnnnnnnnnnnnnnnnnnnnnnnnnnnnnnnnnnnnnnnnnnnnnnnnnnnnnnnnnnnnnnnnnnnnnnnnnnnnnnnnnnnnnnnnnnnnnnnnnnnnnnnnnnnnnnnnnnnnnnnnnnnnnnnnnnnnnnnnnnnnnnnnnnnnnnnnnnnnnnnnnnnnnnnnnnnnnnnnnnnnnnnnnnnnnnnnnnnnnnnnnnnnnnnnnnnnnnnnnnnnnnnnnnnnnnnnnnnnnnnnnnnnnnnnnnnnnnnnnnnnnnnnnnnnnnnnnnnnnnnnnnnnnnnnnnnnnnnntttcttcacaaaagctacaaacacttcaataatttcgtcttttgttctgagaaacagagtccatgtgaatctggaatagtcattcatgattacaaaaatgtatctttgtcctcctctgctttgcagcctcataggtccacacagatccatatgtagaagctcaagcggctttgaggtgctcacatctcttatagacttaaaggatgacttcacatgttttcctctagcacagacatcacagactttctgcatcttaattagtgacaaaggcagaccacaaaccaggtccttctgaattagtttattcagaaaggaaaagcttgcatggcctagtcttatgtgccatagttcatcatcatcatcaacaactttcagacaactcagatcaccactctataaatattcaaagttagcaacatagatgttcttgtatcttttggccaccagtactatttcatcgatcacaaggtcagtgactgtacatattttggacaagaattccatcttgtttcctttatcacagatttgtgaaacactcaggagaccatacttaagtccattgacatagtacacattttcaataggatgagtgagtgacgtcccaactttttcaactccaagaatgtaccctttttaccattgccaaaggatacactccctcattgtagggattttagtgaaagaaagtttgtggtattcctagtcatgtgtttcgaacacccactatccatgaactattgacggccgcctcctttcaccgttccctgcataagagattaggagttagttttaggaacccaaacaagcttgggtcccttgtagtaagcaagaggatgaataagagctctcttagtccatgcagttaatgtgtgtttttttgtaagtggaacctggtccctcttttatggtcacggtttcaacagccactttgtctttctgaactgattgattcttggcctggacacctttcttgaagcgcccagtgttcccacattgggtacgaggctagttatcagagatagtgacatacttactgtgagggttgtgacgcattttctccctttggaaccctgcattcagccttttttcacaatcattattaagtaaggcagtggtagcttctaaggaccgggttcactttaaagacttttcaagatcattcattactctttctagattggtttggagaagctcatttttctcaatttcagcacacatcctaaatcttatagctttcacctcatcttcaagcttaatgtattcctcacttgctatctcctttcctctttcagaactttcaagttttgacttagtccatggttttactattgtttccctttggtatgcaatttttgccaacatatcactcttttcttttctaaggatttcaatggttttcttatggtcagtaactgcagccactaagtcttctatactatgttaagattcttctaattctaagatcaaagaatccctatcctccgcaagactacaaaaggcagtgattaaaacaacacctaaacacatgcgtttttttagagaatagaatttcagatttctcttaacatccctgaagtttacctctttgttgccattgtcttcatcatcatctgattgagccatcaaagcaaaagttgagtcatatccaatctcctcgccttcaactaccatcatggaactaccaccagtattaggtttatcttcagactgttttacttgtgtagttccctcatgagttgtttgcaaagcttcccatatttcttttgcagtgtcactggtagagattctattgtactcttcaggtcccattccatatactagaattttcttggcacaaaaattcttctccaccgctttcttgtctgcttcagtgtattctttgctggtttttgccattgaaaatggaaattcatctagtaacttgattggaacttaaggaccgccgcaaattatatcccatagctcacaatcctcagtcataatgaaatcatgcattctagctttccaccaccaataacattgtccattaaactttgggggtttgtatatggaatgaccttcttcaaaatttggtggagttgccatgaggatccttcctaggtgttagcctaatatgaggaacctgctctgataccaattgttagtttgtatgggtccaccaaactatagagtacctggccctctacaagattctactgagaatgctaacaaaacagtatgtaaatgaggcagagtatttttacgtggaaaaatcccacacaaggggataaaaaaactacgacctatacatgtaggcttttaacttcactaacttgtaatctacctattacaagccactttacaataattcctattgcaaaggatttactcaactaacttgtggtactcttaccacaagccactttgtgacttcctagttacaaaggctttttctaacttgtgatgctctcaccataagccactttgtaactctacaattacaaagacttttccttatggctaaatctaatcacaacataaatttaaggagtttacggattttcaagaggattcctaatcaaacgcttctaggtaagtagtttaggagatacaataagtataataacaaggttacaactcaacaaggacaacaacaggctatcttttaggaactggtccatagttgcgttcaaccttgttcttcaagcttgtgagtattgatttctctatttttgcaagaggcttgaataagaaacagaaaccttccaatgatgttttgtataaagctcattgtgggtacatcttgattacatcacttgaaatgatgtgagtactttgtttggttagagaatgagtgggaggacagtgtagtgtggcaaaaatagtgtcgtcagtcacttcatttccagctatgtccaattgactctgtactgctatgaggaaaccacaagagcatcaggtccttgtgtgggttcctagctcctcaagctgtagcagttcacctctagctggagtctattaaagcttgcagcagtctaagtaggtcaggttccctatctagttcttaacagtaagtttgttagatcatcaaaacataaggcaagaatatttaaaatctatcatcttgtttatgggtgtgttgttcaccacacttataagcaggaggcgacgcatttaggactgtcactctttcttcttactctagatcatgttgtagagcttatttgtaagaattcaaactattaaactctattttattcataataaaacgatacctacatctaaaaatattgttggtaagagatatgtctatggaagagttgcgccagtagaccttgactttgtatcatgtttatgataagtaaatgtgaggtcttcagcagatcatgtgtatactgaaaggtgtaagcttcttgataatgatccctaaggaaagaacatctatccactcttatggtaaaaagcaatgaaagaatcagaagatacaagtttcaacaaataaaagaagcaacgtgaacaagggtacaaggtacctaattagtaaagatgagcattatctacaatttaggaagagaaatataagcatttagagtcaccttcaacaataacaaaggtatgtacaattggccacactcatcttatttatgccctatgagggctaacaaaagaagtataagagagggaaggatattaggattcgactagggttagagcaacccaaaatggtggatagaatgtttgtgtttattcacatttttgaaggatattgcaaatgtgctaatagatctccttgtgagatacctaggtggtgtactctaaaatagtgaagctagatttgtgtactataaagataggcactggaagccttgaagggataaatattaccttagcatggctcccgtccctagtagataaagaatgttacgtaactcgaagagtcagtggatggagcaaggggagctaaaagcaaatgaatatcttgttgaagtatttaaaataaagtgatagacataaatgttagcgggaaataagaagagagataatgaagcattatgagtaagaagtgatacatggatgacaacggtagagtattactgaatctatggtcaaaggaaggaaaagacgaaaggtgacagaccttgatgcaacaaaagagtataagtcataaagtcacatcctcatttcgagaaataaattcgtgaccctaacgtgaataccagaaggaaaagttagaccccaaagtagcagaaatcagtatggattggtgaacaagctaaaataaacatgaattagggactgagtggtttgataatgttcaacatcatgagaatttcatattgcgttctggcgataatagaatggacaacaaacatagattcatgagaaatttagggaatgttcattcaggaagacgcttccttaaagcaagaaatgtgagaaaagttaagcttaagggactgtatgtgccagttacactaagtgtcaccctcgtgaataaggaatttcgttatccttggtacagaaaggatttttgcaagacgagtaagggtcatcgatgatgtgaaaagaagccaaagataaagaggtaaagcatctatacgtagatcttcgtagcactcaacttagcaccttcgtaaagggggaatatggagtaatgtgacattaagtcagaattaagtggttctagtaattatagaatggtaaagaagaatacgacaaaaaaagagggatgagattgcacttattcaaatgctatagataagctacgattctagaacattatgcaaacacgaaatcaaggaggggaagtgagggttcctgcctgagatgttattgacaaataaggagccagtacgagacttaagttaagaaaaaggaaataacccaagaaagattacgcgggatgttaatatgagagtgggctaatgattagtttgtagttgattcaggaagagcctagttatggctagaaaagaggacacagactaatcaataggtagtgcaagataaacatagtaaaccccaacatgcggaattcagtctcgtagatatgacatcatgatccttgagaaatattcagataggagttggggcagttaaaggtaccatatgagtgttactgaaataaaagagaatgccactgggaagacagtcaaaatattagttcagaagcaaccctacaagtacaagggcgtgaaggtaagtaactaaggataattataggtgagtacgaacataaaaaattctgtcgggtaaacgatataaccagcttgtaactttacaagagccaaaaggtccccctaagtactacaatgaaaaactagctgaggaaataaggaagaaggcttcaacctaagaacattgacctaaagagaaaatggtcatgtaacaacagtctcacaactacattatatgcacttcataataaaatggcacctaccgtgggtaatgaacgggaagtaaaattagaagtgatattcaagaccatatgagttttatggaatttcagtatatgtgggaactaagataagctaaatatgcacgcaaaaaggggacagaaagaccattaaaagaatttgcttacgtttgaagaaagctgagatggaacaaaaagaattattcgattaatgctccagagttagttacgttatgaacgcatttaagagttcggagtattatccacttagcatatatgttgacaatcatacagtcgtagaagattttggtataagttaaaagaaaggattgagtccaggtcatcgacaaaggatttaattgttagaagattgtatcctggatcttacatagcgtccatgagaggctaaactaataccatgagccgcagatcgaaagatagcttaagcctgcataaaggatgatcacatggaagaggaaactaaagaattatatcaactaagtaaatcaggagcctgattattggacctagaaagttattgacatcatgatggagaacattgcataatcactcttaatatcagaggtacaagagagatagtataatatctatattctataatggctctacgataaagctagttagaagagtacaagccttataagatgtcagtatgaagctcccaccgtattatgtatgcaccaaaggtgcaagtgttataatgagagattcaagttgtggatgtgaattgtacctatatggaaaggaggtcatgaaagagatagaagatatgatgcgagattttaaggcaaaagtaaacaacgtatgagatactcaaatgcagaaggttgtgaatagtccatactgtagatagaaggctagaagcgctggtatttagtacccaggaatgatagagtcgtcgttagtggcatatattccgtcttatggtttctagatatcgagaggtctagttaagggtgtaaaagaagagttatagacgatgtgatatctagcttgatgttccagaataataaaagaaaatgggtgcaagcaaggttgtgagcaatataaatggatatatgtaggtctcaagataaaatatgataaagcgacaaggttttaggaagacaagagcaaggacaagaaagggtgagtgagaaggtaatgagaaatagatgagtcctcggaattaagcccatgaaaacaagatagctgatggcttctctaagttatagaaagctctgtatagcttgaatggactcaaaggaatctacgactagtagcatttagaaaagatggaatgctaaataattgtgatagataaaggataacatttgtgccttcgaccgagtaatgatttgaagaggatttcatggattttacggaattaaattaccaacgtaaagtgaatcacattggaatgctataaaatacgattattgaagtacaatatcacccctaagtggatcaggaaaatcacttctaatattcctcgatgcagcataagctctagtggtaatgtattatgtaaaaagtttcaagttatcaacggaagattgtagatcaacattgaggtgaatcgataatggatgaacaaaagatacaaagtacgagatgagattaggccatcagacttaagatggatagtaatgaagaagtgttaaaaggcttagctttatgcatataggataagcaatgagagtaacctggagtttggtcgcaggcctcagtaacaataaatcgaagtaagagttatggtatagtatggcctacttagatatagtaaagctaacgattcccagagggacagcttggcatagttttgtatatgttcacaaagtgaggcctagagatcggctaagagctggaggaaataggagagaagcattgcataggcgcacataaagagttagagtcgtacaggcttcatgatagaaggtagcaatagttacgagattagaaggattccgactacatgtcatggtgtgaaaaagatgcttaaaggggggaatgccctagcctttggatttattcaaagaacaattgcctaaatggaaaggagaatattaaagtattcataagggctatgggttatgagaacgataagtgcattagccaacattcgaggacgaatgttccaagggggggggggatgatgttatgccctacagtattacgtcgatattataccctacaatattatacatgaaattgtcataagataactgaactcagttcaaggacaagattgtttagagattataagcattatgctatttcaagcaagtgatggataagttcgtgaagatgagagggtaagcaaatcaaagaaaataaattttcgtcgaagtttgacattttgggataaaatacaggcgagctaaaatacccggtacttatagactagtaccacacaaggtaccacatgaccatgatagtaaggtgtataaggtatgttaaaagtgagtagtattctaagtaatttgatataattcttaattatgtagattattggttaaagattgaattagcaagttaattaaaattagtgggtaattaattaataaccttgcgataagacttagacccccccccccccccccnnnnnnnnnnnnnnnnnnnnnnnnnnnnnnnnnnnnnnnnnnnnnnnnnnnnnnnnnnnnnnnnnnnnnnnnnnnnnnnnnnnnnnnnnnnnnnnnnnnnnnnnnnnnnnnnnnnnnnnnnnnnnnnnnnnnnnnnnnnnnnnnnnnnnnnnnnnnnnnnnnnnnnnnnnnnnnnnnnnnnnnnnnnnnnnnnnnnnnnnnnnnnnnnnnnnnnnnnnnnnnnnnnnnnnnnnnnnnnnnnnnnnnnnnnnnnnnnnnnnnnnnnnnnnnnnnnnnnnnnnnnnnnnnnnnnnnnnnnnnnnnnnnnnnnnnnnnnnnnnnnnnnnnnnnnnnnnnnnnnnnnnnnnnnnnnnnnnnnnnnnnnnnnnnnnnnnnnnnnnnnnnnnnnnnnnnnnnnnnnnnnnnnnnnnnnnnnnnnnnnnnnnnnnnnnnnnnnnnnnnnnnnnnnnnnnnnnnnnnnnnnnnnnnnnnnnnnnnnnnnnnnnnnnnnnnnnnnnnnnnnnnnnnnnnnnnnnnnnnnnnnnnnnnnnnnnnnnnnnnnnnnnnnnnnnnnnnnnnnnnnnnnnnnnnnnnnnnnnnnnnnnnnnnnnnnnnnnnnnnnnnnnnnnnnnnnnnnnnnnnnnnnnnnnnnnnnnnnnnnnnnnnnnnnnnnnnnnnnnnnnnnnnnnnnnnnnnnnnnnnnnnnnnnnnnnnnnnnnnnnnnnnnnnnnnnnnnnnnnnnnnnnnnnnnnnnnnnnnnnnnnnnnnnnnnnnnnnnnnnnnnnnnnnnnnnnnnnnnnnnnnnnnnnnnnnnnnnnnnnnnnnnnnnnnnnnnnnnnnnnnnnnnnnnnnnnnnnnnnnnnnnnnnnnnnnnnnnnnnnnnnnnnnnnnnnnnnnnnnnnnnnnnnnnnnnnnnnnnnnnnnnnnnnnnnnnnnnnnnnnnnnnnnnnnnnnnnnnnnnnnnnnnnnnnnnnnnnnnnnnnnnnnnnnnnnnnnnnnnnnnnnnnnnnnnnnnnnnnnnnnnnnnnnnnnnnnnnnnnnnnnnnnnnnnnnnnnnnnnnnnnnnnnnnnnnnnnnnnnnnnnnnnnnnnnnnnnnnnnnnnnccaagcttggaatgtggggcctacccaaaaaattaaagataacattcataattcaacaatattttctaatctcttaagaagaatttcacccaagctttccattacataatgttaattctaaatctcttgagaaagagtttcaacaaagatgactttgcaatagcaacattattgctttgagcatttcatacggattgttccatatttcgatcttgtcgttacgtgtttcatcgtaatcaacacgtgttggagggcttgtcaatagaatcggataaggtatgttaaggataagtccgtccttcctttggcatgatctcgtaattacatatggttgataaagaggcatcaagagaagttcatgatcccgaatttatatacattatcctagtcttataagttacagtactctaccttatcgggacttcatatttaattgagtattgtctttttctagtcaagagagcatagagcctatagatacagtattacagtattttcattaccatcgatctataatcgatgggcaggcccctattgggcaacctctaatcacatggtaagttatataccaagcctactgcggcggagcgcctatgagcgagcccagttggccgagatacagagcctagtatggttgagagcgtatgagcgagcctactccggcagagcagttatatatatactgagccttagaaggccagacaactattttgcttactatattgagagagttgagtctgtatcaatagatgagcatatcttcagattatctttgactcccagttactttaagttattatattattagttgaatttcagattacagtatattgccttaaatacttggtatattattttgcactgacgtcccttttctgggggcactgcatttcatgcgtgcaggtttagacaaacagagaggtagacctcctcattaggtattgcccaattttagcttgatcggtaagctctatgccctttgtagttgccgggtctaaagctttacgtacatcttgtgtatacatatatatatgttatgagtaggtcggggccctaatccgatcatagtacatccattagtagaggcttgtagacatatcttgtcagttagtgcagtttattagacttgtaggccttgtatgtatattttgattggtttgccaactgtagtagttatgatggccttgtcggccagctttatattgatgtttagtcagcatttgcaaattgtcctgaagtgtggcccatggacaaagtatgacgttatatgttcagagtcccttagtcacaagtttgtacgcaaggatagtaaggcatcgggtgccggtatctccccccaggttcagggcgtgacaataggtttttcaccttttgagctgggtgtttttcacgtaaaaatacttgttttcttcactttctgcatttattgttccacaacagtagcataaggaacacatacaagaaccgggttctcctataatctgtgcatgcaaaaaattggataccacataaatccccccccccctcttgtgtggtatggaagtataaaataataattgatatcagagcgggttatccttgatgaggctaacaccttaggaaagatcaagatgagtgcactacctgaaaactataaagagcaatccaccactaggccagtactattcaatgatcgctattatttttttgtggaaggagagaagaagagttcacttgcagatgactgatggatgctccaaatatggtataaagaactacatgatcaagaactttcctatgtgaaaagtcgggtggaaaaaggagaaatctgaaagaaggaaccaaaagaaggaacacgttcatgacaagaagaactacatcaaaaggtcatccaaagcaatggttactacttggaaagatagttcagatgaagacactaatgataatgctgaacgagctctcatagcaattcaagaatctgaagatgaacctgatcaagaatatgagataagttttctagaccttaaggataaaattaaactcctttctaaagatagactattagaattgttgctaactttaattgatgaatccatgaatattgaaaaagaacagttgtcaaaagagtgtaactttttaaaagcaaaatgcaaaaacctggaaataaacatttgtaaaactaaaaaggaaaataatactttgaagaaccaggttcatgcacttgatacatctgtcttagaacttagatctgagaatctaaaattgaagttaggaacaggtaaagaaatagctagtgacacataactctcactagaaaaggatctaggaaaggtaaaagatgagctttataaaagagatgaactggtaagaaccctgaaggaggacttgactaaggttaagcatgagttagatagaacatgtaaaaggaacgtgtcctctgatgaactttcatgggtacaaaaataccatagtagcaacagaaagggacttggctttggaaattctgcacctaaatgggatcccaaaaataagcacctaacattccctgagaataagatttgcacacactgtgaaaacactggtcaagttgggcttaaaataaaaggaaggtcaaaagaataaaaaaattgttctaggaaaaataggctgccaaattgggctaaaaagaacttaatttttccttttgcctatagaaagggacccaaactagcttgggttcctaagactaacctctaatttttttttgcaggtccaagtgggagagagcaaccaaaagtgatatatgataaaaggttgatcaaaacacataataggaaataataaaaggttcctttcacttttggcctttaaatgaggtaatgtctcctttgaaaatggaaatcaaggtaaaatcattggagttggaaagtcttgcagggaagaagagtgatcaatatatatatagtggatctatccacactttccgataatgaactcacttgcttgagtgtcctggacagtgatcccctcatttggcataagaaacttggacatgctagtctaacaactcaacaaactagtctccaaggacttggtgatagggttgcctaacattaagttcgaggaagataaagtttgtgaggcttgtgcaagggggaagcaggtaagatcttctttaaaaagcaagaaaatggtaagcaccaccagaacgatagaactggtccatatggatctttgtggaccaatgagaacattgaccagatatggtaagagatatgttatggtgcttgttgatgattactctcggtttacttggacactgttttttaatatctagagatgaagcatttgacatgatcacttcatttgttagaaaaacttagaaagaactaggtaattaacttgcatcaattaggtctggacatggtactgaatttgagaatgttaaatttgttgaattgtgcgatgagcatggcataggtcataacttttctgcccctaggactccacatcaaaatggagtagttgaaagaaaaataggaattagaggaaatggctaggactatgctacttgctagtaaattgcctcaaagcttctcgacggacgctgtgaacactgcatggtacatcataaatagttgcatgactagacctcttgttaagaagattccctatgagtcacttaaagagagaaagataaatatatcccatcttagggcatttagatgcaggtactttgttcttaataatgaaaaagattccctaagaatgtttgatcccagaagtgatgagggagtattcttgggatattcttcacatagtaaagcttataagatatacgataaaagaactatgtgtgtagaaaaaagtgtatctgttatttttttttaaaactaatattctttctaagaggcaggaacaagataatgaagagattgggctaataaaaaattcaaatagtgaaaccacagtccatcctgaagatgcatcacatgaaggaataggtgatggaataggtcattccacccatggcaacatgacagggagaactaactagagaggaactgatcctcaaacctcgagggaacctgtccatgaacctattcctcagtaacaaaaccaggaaggaacatccaaagnnnnnnnnnnnnnnnnnnnnnnnnnnnnnnnnnnnnnnnnnnnnnnnnnnnnnnnnnnnnnnnnnnnnnnnnnnnnnnnnnnnnnnnnnnnnnnnnnnnnnnnnnnnnnnnnnnnnnnnnnnnnnnnnnnnnnnnnnnnnnnnnnnnnnnnnnnnnnnnnnnnnnnnnnnnnnnnnnnnnnnnnnnnnnnnnnnnnnnnnnnnnnnnnnnnnnnnnnnnnnnnnnnnnnnnnnnnnnnnnnnnnnnnnnnnnnnnnnnnnnnnnnnnnnnnnnnnnnnnnnnnnnnnnnnnnnnnnnnnnnnnnnnnnnnnnnnnnnnnnnnnnnnnnnnnnnnnnnnnnnnnnnnnnnnnnnnnnnnnnnnnnnnnnnnnnnnnnnnnnnnnnnnnnnnnnnnnnnnnnnnnnnnnnnnnnnnnnnnnnnnnnnnnnnnnnnnnnnnnnnnnnnnnnnnnnnnnnnnnnnnnnnnnnnnnnnnnnnnnnnnnnnnnnnnnnnnnnnnnnnnnnnnnnnnnnnnnnnnnnnnnnnnnnnnnnnnnnnnnnnnnnnnnnnnnnnnnnnnnnnnnnnnnnnnnnnnnnnnnnnnnnnnnnnnnnnnnnnnnnnnnnnnnnnnnnnnnnnnnnnnnnnnnnnnnnnnnnnnnnnnnnnnnnnnnnnnnnnnnnnnnnnnnnnnnnnnnnnnnnnnnnnnnnnnnnnnnnnnnnnnnnnnnnnnnnnnnnnnnnnnnnnnnnnnnnnnnnnnnnnnnnnnnnnnnnnnnnnnnnnnnnnnnnnnnnnnnnnnnnnnnnnnnnnnnnnnnnnnnnnnnnnnnnnnnnnnnnnnnnnnnnnnnnnnnnnnnnnnnnnnnnnnnnnnnnnnnnnnnnnnnnnnnnnnnnnnnnnnnnnnnnnnnnnnnnnnnnnnnnnnnnnnnnnnnnnnnnnnnnnnnnnnnnnnnnnnnnnnnnnnnnnnnnnnnnnnnnnnnnnnnnnnnnnnnnnnnnnnnnnnnnnnnnnnnnnnnnnnnnnnnnnnnnnnnnnnnnnnnnnnnnnnnnnnnnnnnnnnnnnnnnnnnnnnnnnnnnnnngaaacatccatgaatttggatataaatgaacctagttcatctattgatcaaaagttttataggtaaatgattggttctctattatatctcactactagcagacctgatattcttttcagtataggactttgtgattgatttctggcaaatccaaaggagtcgcacttgactgatgttaagaggatcttgagatacttgaaaggcactactggcctttgtcttcggtatccagaagatagtaacttcaacatagtgggatatgttgatgctaattatgcaagttttcttatgtatagaaagagaaacctaggtatgtcatactttcttggctcatgtcttgtgtcttggactaccaaaaagaaaaattttgtggccttatctactgctgaagttaagtatgttgttgctgcctcatgttgtgctcaattgttacggatcaaacaacaattaatggattttggaatttatgaaggttgtatccctatattctgtgataacactagtgcaattagtatgaccaagaacctggttcatcaaaagggaactaagcatatagatgttaggcaatacattttgaggggcaactatgagaagggtttgatcactatagaattttgtgctactgacaagaaaatagctggcatcttcacaaaagctgtaagtatagatcactttgaaagaaacaagttaatattagggatgattaagatcacctaaaaggaaccagttctaactcaaaaatttgttagaaaattgtgaatttttgtacataattagattagattttgctcagtctcatactaccataagtatactcttgtgccatatgataacatgactcattaatatatataatgatattatctctattttcttggaaaattcatactcacacaagagatttttcagtgaagaacctagttcatcaagattatttggtacgtattctccattctgcatagtttgaaataattatattggatcatgattaagagaagagtcacattcaatctcaaaacccattgtacgtatccattataaaaatggaccagtttcgttcaaaagaggagtccaaaccgcattaagtgcctagattctagggaacctctctaacatcttttcaaaacagaaatgcagtttgattagacctctgaaaaggctgtcatcactcaattgaactcctccactttatattgataaggctttacttgtttcttgacttctaaatcttcaagccgtcaaaattctctccaacttctctcatcttccaaacacgctcaaacctccttttctttctccctagcgtagaaatggctaacacctttgataatccctaatcaccaccaaaggaaacctcaccctcaccatctgatacacattcaactactcccatctctaagaaataaagggtaaaaatgatggctcgtaaggttgttgctggtggagaggaaatcaagaaaataaatgaaaaattgaaagcaagtaaggaagaagaacccaaaaatccgatgagtcattcaagtctacaactgagggggaagaaatggtttcttttgagtctaaacatgtaacgtctggccccaaagttaatcctgaaactatttctaaggttgctacaaatttagagaataggtttgttctagtaggatcgatagcagtattgaaattactgagtctggaaaggtgggtggtaaaaataaaagagaaaagaaaaagagagagagggtgattgaaatactgtgagggtaatgggaaaaggagtggccgaatcttcacctactcttgttgtccttactaaagaatcaagtgatgtggtagtctggggtgaataatctgatggagaaaagcagagtgtgagagtaacaggggaaagtgggtctagagaagttgttgaggggttggttaggctaagaaaaaatgttgaagaacttgttccatctgaacagaaaaccctcagacctactaaaaagggtgactgacagttacaatcccaagaagaaaggaagttcaggagctaaaactcttggcattgctagggaaaacaagaaaaggaaggctgccccttctgttatttctgttattatcccacaagaggcagagccacaagaagccagaaaaagcagaatgaggcagaactggagaaagccttggaaaaaagtagaagaaaagtagttgctaagggaaagaagaagatgagtgagaccgttgagactgttgatattgatgagatggacctagtccgtcgagatgaagataagacagaagaagtggaggttatgactcctaaaccagagaaagccaagccttccacaaaaaagtctatttcatagtcaaagtttgcagaaccatccactttagcaaagagaaccaggtctgctgtaaaatcaagaaaagtgaaaattgtagaggaagaagaatggagtggggaggaagaagaagatgattctgatattgtgaaagacaagctggccaagtttggcaagagaactaccttgaaaggcagacttctcaggaacttagaggaggaaggaattttgctgcttttggaaaagttacaattacaaggctagaataacatggtccttcagatggatggcaggtttgccagaactaaaattattgagtttatgcccaattgtgaggtaaaagatggaagggtcaccagtacagtgaaaggagtgaaagtcgcttttaatttaaaaggagctgggtgagattttaggtgtaactgttgaagggtacagtgactataagaagctcaagtggccaagcctagaaaatctccctattgcccttgccattaccagaaaattcagtgacaataagagagaaaattgagcccaaggttgtgtaaaagagtgagatgaagccaccccacaaagtgatgttcaaatttgtcaacaaatgtattctgccaaggtaggaaatgaggcacattgcaaacttcatggacttggtcctgatggaatgtttggatagtgggaggcagattaattggcctggatttattatccaacttattgatagggttataaatggcaccaaaactcatgcaattccctatggcttcattctcacaactgtgcttgcacatttcaaggtacctatgaagagtgggaggttagtacaagaaaggatcattttggtgcaaatactctgctttcttgtgactacgaagtccatgccactcctaaagaacttggttcatccaacaaggtaccagtgaatagtaaggtgtgggccttggtacaagaaaatgggctaaggatgctgagattgaaaggctgaagaagaggttggcagaggtggagaatgagagagatgctctcagaattgagctggcaagagaaaaaaagaagaatgatggcattcttcaagaagtgctgaaactcctccaagccaaaaaccaagcacatggtccttcccagccttaagcctcctagcctagtgtagatcaaccagtgacctagctcgggatttcttttgtttcttttgcccatgatccagtgtttatatttctttttatgctttgtagtaggatcttatcaatcaatgaaattcactgccttttgctctaactgtttgttgatatttcttagatgactaatatccttagattgatagatggtgcttaaatccatgattgtatttgaagtagccccagtggccatgagtaatttttattaaaatctggttatctaacataattatgcaacttttcgatgatgccagaagggagaattaggttgtgcttttactttaaactgtgatgtttataacctaatgaaccccgtcgttgataatttatgtctttaaaatggaaagttttccaacagtgtattgatgttgagctgagttaaaacaggtttcatgcttatgaagcacggagtttgtcatcatcaaaaaggggggaatttattagcttgagtaagtttgttttgatgattgacaaaggaacacatgcatataaccaggtccatggacagtgtacacagatgacggacagaatcaaacaaaagacttgcacataaaagggataagtataagtggttatatctgatattccttgaacgaaaatgttgcatacttgataaggaccaggactacttactcgaagagaactctatccaatataagagaagaattataagttgaagttgactagaactcttttaccaaggaagagtaaagcattagaactctagttaatctttatttactaattctataaatattagtgttgttttcttttacaggtgatacacacatacttaagtaaaaagnnnnnnnnnnnnnnnnnnnnnnnnnnnnnnnnnnnnnnnnnnnnnnnnnnnnnnnnnnnnnnnnnnnnnnnnnnnnnnnnnnnnnnnnnnnnnnnnnnnnnnnnnnnnnnnnnnnnnnnnnnnnnnnnnnnnnnnnnnnnnnnnnnnnnnnnnnnnnnnnnnnnnnnnnnnnnnnnnnnnnnnnnnnnnnnnnnnnnnnnnnnnnnnnnnnnnnnnnnnnnnnnnnnnnnnnnnnnnnnnnnnnnnnnnnnnnnnnnnnnnnnnnnnnnnnnnnnnnnnnnnnnnnnnnnnnnnnnnnnnnnnnnnnnnnnnnnnnnnnnnnnnnnnnnnnnnnnnnnnnnnnnnnnnnnnnnnnnnnnnnnnnnnnnnnnnnnnnnnnnnnnnnnnnnnnnnnnnnnnnnnnnnnnnnnnnnnnnnnnnnnnnnnnnnnnnnnnnnnnnnnnnnnnnnnnnnnnnnnnnnnnnnnnnnnnnnnnnnnnnnnnnnnnnnnnnnnnnnnnnnnnnnnnnnnnnnnnnntacaaattgagagcaaaatagcaaggcattttgtgagcaattcctgtgagatttatgagtgcgatcttgatgctacacgaaccagattgaagaaccagctccataaagagttttatatgtctttctttatttctagttcaaagtgtagtaggcgttttaagttatacctttcagttttctaagaagcaaattatactaggtacctgagttnnnnnnnnnnnnnnnnnnnnnnnnnnnnnnnnnnnnnnnnnnnnnnnnnnnnnnnnnnnnnnnnnnnnnnnnnnnnnnnnnnnnnnnnnnnnnnnnnnnnnnnnnnnnnnnnnnnnnnnnnnnnnnnnnnnnnnnnnnnnnnnnnnnnnnnnnnnnnnnnnnnnnnnnnnnnnnnnnnnnnnnnnnnnnnnnnnnnnnnnnnnnnnnnnnnnnnnnnnnnnnnnnnnnnnnnnnnnnnnnnnnnnnnnnnnnnnnnnnnnnnnnnnnnnnnnnnnnnnnnnnnnnnnnnnnnnnnnnnnnnnnnnnnnnnnnnnnnnnnnnnnnnnnnnnnnnnnnnnnnnnnnnnnnnnnnnnnnnnnnnnnnnnnnnnnnnnnnnnnnnnnnnnnnnnnnnnnnnnnnnnnnnnnnnnnnnnnnnnnnnnnnnnnnnnnnnnnnnnnnnnnnnnnnnnnnnnnnnnnnnnnnnnnnnnnnnnnnnnnnnnnnnnnnnnnnnnnnnnnnnnnnnnnnnnnnnnnnnnnnnnnnnnnnnnnnnnnnnnnnnnnnnnnnnnnnnnnnnnnnnnnnnnnnnnnnnnnnnnnnnnnnnnnnnnnnnnnnnnnnnnnnnnnnnnnnnnnnnnnnnnnnnnnnnnnnnnnnnnnnnnnnnnnnnnnnnnnnnnnnnnnnnnnnnnnnnnnnnnnnnnnnnnnnnnnnataagggttggagttaatccgtaagtttgcaagagtttgtaaactttgttgttggctcagagttatagtgaagtgtttggagaaaatcctattgggtagtaggtcgtgattttttcaccttttgagtcgtgtgttttccatgtaaaaatccttatattctttactttctacatttattattccataatatagtataagcaatacatagaagaacatggttcttttataatacgtgcacgtgaaaaattggacacccctcttgtgtggtattgaagtataaaataacacaaaggttactcgcaaatcgacccaatgcatcgggaacaagcatcgtcataacgtatgacgtcactccctctcttggaccagattgctccaacaaatcacccgggaaatttaagggatttgaaatacgcagcccacagagagccacattgcctgctctctataacgactatgacccatgttatctcttcgacaagcccgaccatgaacgacattatccgctcattgagcgcgcccgcgaagacgacctcaagaagcggaggaactaactgtatgggcaaaaaattatcatagttgtatttagattacgtcaacattaagagggccttcgaaggctatcacgtgtcatcagtgtgacttcaataatagacagattcaaggctgaagtgatttgacaagagatgaagtgctaggtcgaggagtcaacagagatcaaggtcgaggacgtgcagtatccttaaattaagtaataacggccagttttaggataagactttaaagagaatatttcagtgaatattctctcgatctgtattattagggttttgtcacacatgtccccttataaatagaaagagacatagttataggggatattgaacactcatttggaaaacaacaacacctttctttgtgattcttgctttatcacatatatacaaaatacaccttttcttgagatcattgtctagcttttctcttacgatccaaggagaatctgaatattcaaaggcttatcaatcatttatcattgtcaaaaggaatattacacggcttcatctcctttttcgttcatctctgtaacatatatttatataaataccattatacatcatttattgctatcgaatgctattcacttcacatttgtgtcattaagtgttgtattattgcatatttaccactgttaccgtagatctcgtaacactttgttgcggcactagttaaacaatctagtggatattataattggctaagattaaccctaccttattaaaaaaatctaattatttaaacctagatctaaattttgggcaaatattaatactaataaaatacttgcacctccagtaatgagttggattatcatgtgcttcctttattttggtatgatcattcaggcgacaacagcaaaataaaaatacaagtgaaaggtttcgtattttaacaatgttaaaaatgataaacttcttcatcaagtctgaagtctcagagtttggttttcgtgctctttaatttcttgcttctattttaccgacagataggatttaaaaaatatacacatccagtattaattggagttgaagtcttgaagattcctcttctctcttgtattattaccagtcatataaaacgacaagagttgcatatgtatgtatgtagtgttgggagttgacctcgatgctttctttcttgcgaggtgctattcgttgatatatcatcacaaaggacaagacttgctggaaatcatgtgtaactcccgcttttctggtgttatgaataaattaaaaacttagcacatcaaatggttggagaagacttctttgttctcttaggatgcactccctccctcccatttcatatgattgtgattcggagtacaaggatgaagctatctactttttgtgtgaatgtgaacaaagaattttcaaataatttgaaatatcatttacatatttaaaagctacgcaaaataatactataaatcatagtaacaagtaacatttcaaaatatttaatagacatgtgaaaacatgaggtcaaagaaaaactcctttgatatcccatgtgaatgttgagatccacatttatttcttcatgtgtcgcgttccttgaaaaatacattgctataccttctaccaagatcgagtccttggttctactaatttttaggatccgtttggatatagattccccaatatttttgttatgatccgaaattctcaccttcggaagtcgtgatggcgcctactagtagaagctaggcaagccacgaacttagaaatctttaactcttctgttttaatcttttttttttcttttttacaacttatattaacaagtgataaacatctaaatggcagcagaatatgagatttaagtgaaagacttaaataaatataaaaccaaaatgtttcgaaagtcaacacatgcctctacccagaaactggtgtcacaatatccacagactattaagagtactacatacaacggtttgaagcaagaataacattgtttgcctcggatacatgagataacaaaacataataaaagataaaggagacgtcgggcctgcggacgcctgcaaggctacctcgatgtctcggtggactgaaggttggctcccctactgctgctgatcaagtgccgctccggtatctgcacaaagtgcatagtgtagtatcagcacaaccgaccccatgtgctggtaagtgcctggcctaaccccggcgaggtagtgaccaagctaggaccagactccagataaacctgtgcagttatataatatatggcggaaaataaacatgaataagaagtttaaaattggagggggaaacatgcttcggggaaacatatcaattctatcagaaacttaataaactatgaaagaacactcgatgtctacaatcaatacgataacaatactgttgcggcgcgcaacacgatcctttatcatttaacattgttgcggcgtgcaacccgatccacatatataactgttgcggcgtgcaacccgatccaatataatatctgttgcggcnnnnnnnnnnnnnnnnnnnnnnnnnnnnnnnnnnnnnnnnnnnnnnnnnnnnnnnnnnnnnnnnnnnnnnnnnnnnnnnnnnnnnnnnnnnnnnnnnnnnnnnnnnnnnnnnnnnnnnnnnnnnnnnnnnnnnnnnnnnnnnnnnnnnnnnnnnnnnnnnnnnnnnnnnnnnnnnnnnnnnnnnnnnnnnnnnnnnnnnnnnnnnnnnnnnnnnnnnnnnnnnnnnnnnnnnnnnnnnnnnnnnnnnnnnnnnnnnnnnnnnnnnnnnnnnnnnnnnnnnnnnnnnnnnnnnnnnnnnnnnnnnnnnnnnnnnnnnnnnnnnnnnnnnnnnnnnnnnnnnnnnnnnnnnnnnnnnnnnnnnnnnnnnnnnnnnnnnnnnnnnnnnnnnnnnnnnnnnnnnnnnnnnnnnnnnnnnnnnnnnnnnnnnnnnnnnnnnnnnnnnnnnnnnnnnnnnnnnnnnnnnnnnnnnnnnnnnnnnnnnnnnnnnnnnnnnnnnnnnnnnnnnnnnnnnnnnnnnnnnnnnnnnnnnnnnnnnnnnnnnnnnnnnnnnnnnnnnnnnnnnnnnnnnnnnnnnnnnnnnnnnnnnnnnnnnnnnnnnnnnnnnnnnnnnnnnnnnnnnnnnnnnnnnnnnnnnnnnnnnnnnnnnnnnnnnnnnnnnnnnnnnnnnnnnnnnnnnnnnnnnnnnnnnnnnnnnnnnnnnnnnnnnnnnnnnnnnnnnnnnnnnnnnnnnnnnnnnnnnnnnnnnnnnnnnnnnnnnnnnnnnnnnnnnnnnnnnnnnnnnnnnnnnnnnnnnnnnnnnnnnnnnnnnnnnnnnnnnnnnnnnnnnnnnnnnnnnnnnnnnnnnnnnnnnnnnnnnnnnnnnnnnnnnnnnnnnnnnnnnnnnnnnnnnnnnnnnnnnnnnnnnnnnnnnnnattgcggcgtgcaacctaatccacatatataactgttgtggcgcgcaacccgttccagatatacagtcaacaataatcataattaaccgccccgacaagggatcaataatagactacactatccggcaaaggaactcaacagtacaagtatatacgtcccgataagggagtaaccgccataaccaaacttgttccaacatctaactatctcaactataactcagctagtttcaacatccaactaccccagctataactaaacttgttacaactcctaacacgaagaatcatcaacctaagcgtccgtaatatcaattaagaacacaatgcaagggaacatcaactcaacaatagcccggcaaggggggcaacataatgatctctactctttctcacttttacctcacaattaacttcacaactcgagccaatgctctagagtttcgattatcactgagcccacgctccttaatgttcataggtcacaattctttccacaactttacacaataaatagaaatcttcaccaaggcacgaataatacaacgagatcatgaaaatcacagtataagactcacggtcatgcttgacaccaacgcatagatactcgtcaccatgcctatacgtcgtactcgacaagaaacaaatagcaaataggacacaactcctaatccctcaagctaaggttagaccaaacacttacctcgatgccacaaacacaactcaaggttcaattatagctttaccccttgattccaccgccaattcgctcgtatctactcacaaattacttaattacatcactaaccgctaaatgaatcaattctaatgcatgaaaataggttttaccaagatttccccaaaaattcaaaaattgcccccgggcccacatggtcaaaacccgaggttccaaccaaaacccgattacccattcccccacgagctcaaatatataatttgttttgaaatcggatctcaaatcgaggtccaaatccccattttttgaaaaatataggttttacccaaaacactcgatttcccccatgaaaattattgatttgaagttgaaatcatgttaaaagatattagtgattgaagacaattagttaaaaatgacttacattgatttggagaagaaagagtgtttgaaaaatcacctcttatgtttttggggtttttgaaaagtgcaaaatgactgatagtctcgtctatttatacccctctcagaccctctccgcggaccgcataaaaaggactgcgtccgcggagctccaccgcggactgcgagacctggcttcagagacctgcaacttctctgaatctgcaactttttcctaagtgtaaaaacatcccgaaactcacccgagccctcagggctccaaaccaaatgtcatactaactcaaaaatatcatatggacttactcgtataatcaaatcctcaaaataacctcatgaacatcaaattaaatctcgagatcaatgaaattttctccaaaacttctttaaacataaattttgcaatttaagtcnnnnnnnnnnnnnnnnnnnnnnnnnnnnnnnnnnnnnnnnnnnnnnnnnnnnnnnnnnnnnnnnnnnnnnnnnnnnnnnnnnnnnnnnnnnnnnnnnnnnnnnnnnnnnnnnnnnnnnnnnnnnnnnnnnnnnnnnnnnnnnnnnnnnnnnnnnnnnnnnnnnnnnnnnnnnnnnnnnnnnnnnnnnnnnnnnnnnnnnnnnnnnnnnnnnnnnnnnnnnnnnnnnnnnnnnnnnnnnnnnnnnnnnnnnnnnnnnnnnnnnnnnnnnnnnnnnnnnnnnnnnnnnnnnnnnnnnnnnnnnnnnnnnnnnnnnnnnnnnnnnnnnnnnnnnnnnnnnnnnnnnnnnnnnnnncaaatcacgtcatatgacatctgtttttcaccaaattccacagaaaggtcttaaaccatatataagatctgtaccgagcaccgaaacacaaattcggtcccgataccatcatgttctaatcaaattccatttcaaatttctttaaacaattccagaaaataatttcctttaaaaattcatttctcaggcttgggacctcggaattcgattctgggcatacacccaagtcccatattttcctacggatcctccaggaccttcaaatcacgggtccgagtctgtttacccaaatgttgaccgaagtcaaatttatttattttacagtcaaaacttatcatttttcacagattatcatatttaagttgtctggctacgcgcccggactgcgcatgcaactcgaggtgactctaaataaggttttcaaggcctcagaacatggaagtttcatattaaaacaagttatgaccttttgggtcatcacattctccacttctaaaataatcgttcctcctcgaacggacagtacctgaaggaagtacctgagtcgggaaaaagatggggataatggctccgcatatcggactccgactcccaggtcgatgcctccgtaggctgatctctccattgaacatgaacagaaggaaaactcttcgatctcaactaacgaatctgcaggtctagaatagccaccggcttctcctcatacgacaagtccctgccaactgaatagtgttgaagtctaacacgtgatatggatcgccgtgatacttacgaagcatggacatgtgaaacactagatgcacggttgaaaagctcgacagcaatgcaagtctataagccacctctcccactcgatcgggaatctcaaacggaccaatgaacctagggctaagcttgccctttttcccaaatctcatcactcccttcataggaaacactcggagcaatacccgctcaccgaccataaatgccacatctcaaacctttcgttctgcataacctttttgcctggactgagctgtacgaagcctatcctgaataatcctaacattgtccaaggcctcctgaacaagatctgtacccaacaaccgagcctctcccggctcaaaccatcatatcggagaccggcactgcctaccatataaagcctcataaggagctatctggatactcgactggtagctgttgttgtaggcgaactctgctaaaggcaaaaactgatcccacgagcctccaaagtcaatacacaagctcagagcatatcctccaaagtcgtacttaacctgctgacaattcaaacaccgagctacatatgcaatgatatccttcttcattctctgccaccaataatgctgccgcaaatcctgatacatcttcgcggcgcccggatgaatagactatcgggaactatgggcctcctctaagatcaactctcggagtccatccacattaggcacataaacttgtccctacaatctcaaaactccatcatcatctaaggtaacctgcttggcacctccatgctgcaccgtctctaaggaacacacaaatggggatcatcatactgccgattacggatacgctccaataaagaagaacaagcggctgtgcaagctagcacatggctgggctcagagacatccaacctcatgaattgattggccaaatcccgaacatccaaagcaagcggtctctcaccgcccggaatataagcaagattgcccatactggatgacttcctactcaatgcatcggccaccacattggcctttcccggatgatataagatagtgatatcataatctttcaacaactctaaccacctcctctgtctcaaattcaactcctgttgcttgaacaaatactgaagactcttgtgatccgtgaacacctcacatgccacgccatacagataatgtctccaaattttcaatgcgtaaacaatggctgccaactccaaatcatggaccgggtagttcttctcatgaatcttcaactgccgcaaagcataagcaatgaccttgccatcctgcatcaacactgcaccaagttcaatacgatatgcatcacaatagactgtataaggccctgaatctgtgggcaaaattaacactggtgtcgtattcagagctgtcttgggcttctgaaagctcgcctcacactcgtccaaccatctgaattgggcacccttctaggttaatctagtcattggggctgcgatagatgaaaacccctccacgaaccgacgatattagcctaccaatcccaagaaactctgaatctgtgtagctgatgctggtctaggccagaaatgcaactaaactcaaccagaactcacacttcgagaacttagcatataaccggttatccctcaaggtctgatgaaccactctaagatgctactcgtggtcctcccagctacaagaatatatcaaaatatcatcaatgaagactatcacaaacgagtccaaataaggcctaaacacgcggttcatcaaatccataaaagctgttggggcattgatcaacccaaatgacatgaccaagaactcataatgcccataccgagtgtggaaagctgtcttagggacatcggatgccctaatcctgaactgatgatagccagatctcaaatcaatctttgagaacaccttggcaccctgaagctgataaaacaaatcatcgatcctcggcaatggatacttattcttgattgtaaccttgttcaactgccggtaatcaatatacattctcattaatccgtccttcttcttaacaaacaacaccggcgcaccccaaggtgaaacaagggtctaatgaaacccttctcaagtaggtgttgcaacttatccttcaactctttcaactcagacggagccatacgatacggcggaatagaaacgggctgagtgcccagatccaaatcaatgcaaatgtcaatatccctatcgggtgtcatacctggcaggtctgaagtgaaaacctcaggaaactcatgaacaacgggtacagaatcaatagagggaacctcggcactagaatcacgaacatatgccaaataggacaaataccccttctcgaccatacgccaagccttcacataagagataaacctacgggtagaatgactaggagtacctctccactctaaacgaggtaaacccgataaggctaaggtcacagtcttggcatgatagtctaagatagcgtggtaaggtgataaccagtccatccccaatataacatagaaatcgaccatgtccagaagcaacagatctacacgagtctcaagaccctcaatcacaactataaaagagcgatggactcgatctaccataatagaatcacccaccggtgtagacacatatacaggaacactcaatgaatcactaggcatgtccagatacggtgcaaaataagatgacacatacgagtacgtagaccctggatcaaataacactaaagcatctctatcacaaacaagaaccgtacctgtaataactacatctaaagcctcagcctcgggcttggctggaagagcataacatcagggatgggccccaccaccctggactacatttctgggacggcctgtagctggctggcctccacctctagcggtctgagctccacctctaaatcctctacctccacatctagaacctctagctggctgggtggtctgtggaaaacctggtgccccaaccatagcgcggaaaccctgctgctgcgactgagtacccactaacctcggacaagtcctcctaatataaccatactcaccacactcaaaacatccacctaagtgttgtggctgaggaaactgagactgaccctggcgacctgaataaccaccccgaaaactctggagcagcagtgcactgataggagctggtggtgcactgtaggactgctgatcagaatattgcatctgcggactacggctacctgaagcaccgtgagaaacctgaagagctgactgaatacaacccgatctaaaatactcggtatttatggactagtgccatacgaggtaccacatgactacgacataaggtatatataaagtatattaaaaatgagtagtattttaaagtaatttgagacatttcttaattatgcaaataattgattaattaccgggtaatagaacgttacctaattactggataaagattaagctttcccaccctaaaacgtggcagcaagactagctctaaattgtgactcttaatgtcacatattaaggtgtcaaaacttagtaagatttgtggccaagtcactaaattagtggggcctacagcattaaaacataagacctctctaaaaagagttgcttatataaaaaatggtaggcaatttgccttagtaacgtgactggcattctgtttcaataaattcaagcaagcatatcttagaaatgtgatatttttgaaattctaacgaagcctggtataatttttctcaagaatatcatacggatttttctctacttcaatctgtcattacatgtttttcacataagacgtgtgttagaagaattgttaagagaatcggtccgggtatgttaagactatcccttatttcttttggcatgatctatacgtcacaaacgaaacgagtaaatgcacaatttcaataaatgactctaatcatagaaatactaggggtgtctatattcttgattcccaatgtagattattattatatcttctattcacggtctcagaaaaatacgtatttgataaagtttatccgaaaggcatatgaatttttatggcattctgagaaaatcttattgacatattttcttatgcatttcatgcatttatacatgtacattgacccatgactagatggcgttatatatgcatatatatgtatattatatgtatatgggatatgggaaaaggttacgatattgtatacgcaccaccacctgatcagctggtatacgttgatgattttgcccatagtggacgagatgatatgatgggatgccctcagaggcttgatgatgttatgaacacatgtacctatacacgacatgacattcatacatatatgcatgacactaaaagtatttcataatttacagagttatccagacttacaggttgagtcatttactttatatttcttccatgtcttttacgtacttatttatgtgccttacatactcggtacattattcgtattgacgttccttttgcttgaggactctgcatttcatgtccgcaggtctcgatagataggtcaagagtcctctaagtaggcgatcaactcagcggaagatgttggtgctctccatttgctccggagttgcttgtttggtcagtatgatttatatgtgtattgtttggtatggagggttctgtccctacctttataacaattatgtatccttagaggcttgtagacaaatatcatgtatgtaagagattgtatggccttgacaacctatgttcagtgcacgagtgattattttggtcttagaggctcatatgtcttatgtataagttggtattacatattgtattctacctatttcacggtggcctctccgacccagttatctatgatagtatgatatgaaaagatacattatgttggtactcggttgagtaagatatcgggtgcccgtcacgaaccatcgattttggtcgtgacataattacttctataaacaaacatatatttgaattttttatttttaaaaaaaacttccaaaacttatggccaaacgcctacttaaacttacttatgcttttggcctttgaataaagttagaaaatccatttgtgtattccttgaaagcgagccatgcattgtcgagtcaacttaccagcaaatacttcttgtaagatttaatttttcatataacattttcctttttcttttccttttttttttgtctttttctttgcatgcatgtcatcaggcccagctggcgcctaaggccactaaggcaatggccttaagcccccaaaatacttacggccccaaaatataaaaataatatatatatataatattttgataattatatactattgttagaaattttaaatcatttggttaaaatagttatagctaaaagttttacaaatattaaatttcagttactagttattttctgtctttaattcgtcccaacttaagttgatcttcttacaatgttagtttagaacagtttttcttaattctttgagtgcatttgtagacatttttcaagctactttgattagtaactattaaaatttgtccttaacattaattgactcttgaaacatagtagttactataatattatttgtttcaacttatatttagatttaaaagtgctaagagaaactgtatacgtagaagaatactctaatgggtaaacttaatcagctaaaaagtgttaattcaatattgttaattaacaaattaacttgagatttttaaattaaaataggttggatttttctatatcagttgtctcggttgaaaaagtttttaaaaactaagtcaataaagttcaacaaaataatacaagagagattaaacaaattggttagacattggcaataattaaaactgattataaatttcgataaattataagagagaaaaaaattaaggcctcacttttaattttcgccttaggcctcatattatgtcgatccgccccagcatgtcattatttatagaatatatgccaaaacaataaagtttatatacaatacaggtatgtgttaaaactgatgatcggtcctaaactatatgcacaaaatttaaaaaatgagattatgtgagcagaagggacctacatatatatatatatatacttacggataccctgaacatatccaccattagtggatcatcggataatgacattggactaataaagctcagttagcccatttgttttgaaaatcattgggttgtgtttcattgtagaggaattttcaaaaagtattatagtttagagtccaattattaacatagttatagttggcctaattatcattcgtaggtaatgtatttcaatttcgctgtatcaaacgcatacaaccaaattcaaattttgttgtatcaattcattgtcaggctgcatcaataaataccgttttgatggaaaagttgtattaactatattaattcgtgaataacggttgtatcaatgaatataattttgatggaaagcgatatcaattagaggcagaactaggtgtcggcccaagaaaaggtttgttttgaagattgacaaatgaagatcaggcatgaaccaggtccatcccttgtgagcatagacacgggcagattcgagcatatgggatgcacgtgacgaagataagcttaacttggtatatttgatatctccttatcgaaaaggttgcataattaataaggagaaggactccttacttaaagtgaatactatccaaaataaggaaggagctagaggttgaaggtaactagaacttttccactaaagaagagtagcattagaactctagttattttctactctactaactctataaatcacaggatattctcactttacaggtgatgcacacatactgaagttaagagcaaattgagagcaaaatagcaaggcattttgtgagcaactcctgtgagttttaagagtgtgatcctgaagctacacgaaccagattgaagaaccaactccataaagagttttatgtgtctttctttatttctagttcaaagtgtagtatgtgttttgagttgtacctttcagctttcttagaagcaaattgtactaggtgcttgagttgtatcattcaagttagagttaatgtgaagtagccgcaacggcctgtggcgggttgctataatgattagagttaatctttaggtttgcaagaggttgtaaactcgatttttattattcatgttagagttaacatgaagcaatcgcaacagcctagggctggttgctataagggctagagttaatccttaggtttgcaagagtttgtaaactttgttgttggctctgagttgtagtgaagtgtttggagaaaatcctactaggtagcaggttgtgggttttttacattttaagcgggtgttttctacgtaaaaatccttgtgttatttactttctacatttattattctgcaactgtagtataaggaacacatagaagaaccaggttcttctataatttgtgcacaaaaaaaattggacaccacacaaatcaccccatcccctctcttatgtggtattgaagtaaaaaatatcaattggtatcagagcagattatacttgaagaggcaaataccttaggaaaagatcaagatgagtgcactatctgaaaactctaaagagcaatctaccactaggccaccactattcaatgatcactattattttttgtggaaggagaggagaagagatcacttgcagatgactgatggatgcttcaaatgtggtaaaaaaaaccacatgatcaagaactgtcctatatggaaagtcgagtgaaaaaaagagaaatatgaaataaggaacaggttcatgacaagaagaactacaacaaaaggtcatctaaagcaatggttgctacttggaaagatagttcagatgaagacattgatgataatgttgaacgagctctcatagcaattcaagaatttgaaaatgaacctgatcaagaatatgagataagttttctggaccttaagaataaaattaaactcctttctaaagatagactatcaaaattgtttctaactttaattgatgaatctaagaatataagttatgaaaaagaacagttatcaaaagagggtaactatttaaaaacaaaatgcaaaagcctgaaaataaacatttgtaaaacttaaaaggaaaatactgctttgaagaaccaggttcatgcacttgatacatttgtcttagaacttatatctgagaatctgaaattgaagttaggaacaggtaaagaaatagccagtgacacacaactctcactagaaaaggatctaggaaaggtaaaagatgagctttataaaagggatgaactggtaagaaccttgaaggatgacttgactaagattaagcataagttagatagaacatgtaaatggaacagatcctttgatgcactttcatgactacaagaataccatagtagcaatagaaagggacttagcattgggaactctgcacctaaatgggatcccaaaaataagtacctaatattccctgagaataagatttgcacacactgtagaaacacgggtcactacaagagtgattgcattacaaaagaaaaggcagatcaaaagaataaaaattttattctagggaaaaatgttgccaagttgggctaaaaagaatttaatttatccttttgcctatagaaagggacccaaactagtttgggttcctacgactaacctctgatattcttttataggtccaagtgataaagagcaaccaaaaataatatatgataaaaggttgctcaaaacacatgacaggaaattagaaaatgttccattcacttgtggcctttaaaagaggtaatgtctcctctgaaaagagaaagcaaggtaaaatcattggagtcggaaagtcttgccaggaagaagagtgaaaaatatatatgttgtagatctgtccatacttttcgataatgaactcactttcttgagtgtcctggacagtgatccccttcttttgcataagagacttagacatgataatctaagttgactcaacaaactagtcttcaagaacttggtaatagggctgcctaaaattaagttcgaggaagataaagtttgtgaggcttgtacaagggagaagcaggtaagatcttctttcaaaagcaagaaaatggtaagcaccaccagaacgatggaactggcccatatggatttttggggacgaatgagaacattgagcagaggtggtaagagatatgttatggtatatgttgatgattactctaggtttacttgtacactgtttttaacatctagagatgaagtatttgacatgttcacttcatttttttttagaaaaactcagaaaaatctagataatcaacttgcatcaattaggtctgatcatgatactgaatttgagaatgttacagaagttatgaataatgcatgctacgtcataaatagttgcataactagacctcttgttaagaaggcttcccatgagatatttaaagggataaagccaaatatatatcctactttagggcatttggatgtaagtgctctgcgcacaataatgtaaaagactccctaggtaagtttgatcccagaagtgatgagagagtatttttgggatattcttcacatagtaaagcttataagatatataaaaaagaactatgtatgtaaaagaaagtgtgtatgttatttttgaaactaaaattctttccgagaagcaggaacaagatgatgaagatattggactgacaagaaactcaaatgatgaagccacagtctagcctgaagctgcatcacaggaagaaataggtgatggaatgggggtttccaccgtgggcaacctgacaaggcgaagtgactagagaggaactaatcctcaaacctcgagggaacttgtccatgaacctattccttagtaacaaaaccagaaaggaacatccaaagaaattaacactcctattgcaacatccactaaattggatatagatgaacctcgttcatctgttgaccagaagttgtatagaggaatgattggctctttgttatatctcactaccagcaggcctgacattgtttttagcgtaggcctttgtgctcgatttcaggaaaatccaaaggagtctcacttgactgccatcaagaaagtcttgagatacttgaaaggcaccactaacctttgtctatggtatccaaaaggtagtaatttcaacttagtgggatatgttgatgctgattatgtaggttttcttgtgaatagaaagagcacctcaggtatggaacactttcttggctcatgtcttgtgtcttgggctactaaaaagtaaaattctgtagcgctatctactggcgaatatgagtatgttgttggtgcctcatattgtgcttaattattatggatcaaacaacaattaatggatgttggaattgatataggttgtatccctatattctgtgatatcactagtgccattagtgtgaccaagaatccggttcatcataatagaactaagcaaatatatgttaggcatcattttttgagggacaactatgagaaggggttgattactatggaattttgtgctactgacaagaaaatagctgacatcttcacaaaagctctaagtagagatcactttgaaaggaacatgttagaattaggnnnnnnnnnnnnnnnnnnnnnnnnnnnnnnnnnnnnnnnnnnnnnnnnnnnnnnnnnnnnnnnnnnnnnnnnnnnnnnnnnnnnnnnnnnnnnnnnnnnnnnnnnnnnnnnnnnnnnnnnnnnnnnnnnnnnnnnnnnnnnnnnnnnnnnnnnnnnnnnnnnnnnnnnnnnnnnnnnnnnnnnnnnnnnnnnnnnnnnnnnnnnnnnnnnnnnnnnnnnnnnnnnnnnnnnnnnnnnnnnnnnnnnnnnnnnnnnnnnnnnnnnnnnnnnnnnnnnnnnnnnnnnnnnnnnnnnnnnnnnnnnnnnnnnnnnnnnnnnnnnnnnnnnnnnnnnnnnnnnnnnnnnnnnnnnnnnnnnnnnnnnnnnnnnnnnnnnnnnnnnnnnnnnnnnnnnnnnnnnnnnnnnnnnnnnnnnnnnnnnnnnnnnnnnnnnnnnnnnnnnnnnnnnnnnnnnnnnnnnnnnnnnnnnnnnnnnnnnnnnnnnnnnnnnnnnnnnnnnnnnnnnnnnnnnnnnnnnnnnnnnnnnnnnnnnnnnnnnnnnnnnnnnnnnnnnnnnnnnnnnnnnnnnnnnnnnnnnnnnnnnnnnnnnnnnnnnnnnnnnnnnnnnnnnnnnnnnnnnnnnnnnnnnnnnnnnnnnnnnnnnnnnnnnnnnnnnnnnnnnnnnnnnnnnnnnnnnnnnnnnnnnnnnnnnnnnnnnnnnnnnnnnnnnnnnnnnnnnnnnnnnnnnnnnnnnnnnnnnnnnnnnnnnnnnnnnnnnnnnnnnnnnnnnnnnnnnnnnnnnnnnnnnnnnnnnnnnnnnnnnnnnnnnnnnnnnnnnnnnnnnnnnnnnnnnnnnnnnnnnnnnnnnnnnnnnnnnnnnnnnnnnnnnnnnnnnnnnnnnnnnnnnnnnnnnnnnnnnnnnnnnnnnnnnnnnnnnnnnnnnnnnnnnnnnnnnnnnnnnnnnnnnnnnnnnnnnnnnnnnnnnnnnnnnnnnnnnnnnnnnnnnnnnnnnnnnnnnnnnnnnnnnnnnnnnnnnnnnnnnnnnnnnnnnnnnnnnnnnnnnnnnnnnnnnnnnnnnnnnnnnnnnnnnnnnnnnnnnnnnnnnnnnnnnnnnnnnnnnnnnnnnnnnnntgtcacgaccctaaatccggacccggtcgtgatggcacctctcatgaagacaaggccagccgacactttcttatttcagttttaagcaattaaacaataagaactaaatctaaaacgtaataaataatcccaaagtaagcagtgaatagtacaatgtagaagtaaaaccaacacagcccgataccggggtgtcactagtcatgagcatctacaatccggatgatacaagaaaggtctatatagtctaatacaaatttaaaacagaggaagataagataaaggaagaagctctaggatgcgaacgccgacaactacctagagaatcttcgaatccgcctgagctggaaaagatcaacactcgttagcgggacctgatgcgcttgaatctgcacacgggttgcatggagtaaagtgagtactccaactcagtgtgtaataatcataaataaagactgaaagtaagaaatcacataaggcacattataggctataaggaagtagtaaaagctagtaaaacagtgaagcagtaaagctgtataaaattaccgagttcagtttaaaacttcataaaatgcctttttaacaattaagcaagcaaatgacaggaaattaggaaagataaacatataaaggatcgcccctctggcacagtgtcaacaaatccaccctcgggcaatatctcagaaacaatactagcccctcgggctatatcttacatcacaatgggtacccgcgctcactaggtatgtgcagactcctggaggggctccttaaggaccaaccgcaatatcaagcactcttgtggcatcatcactaggccctcggccttatatcaacaagccaccttgtggcttacaaatctcaggccctcggcctcataatcataatcaggtgtttcctcacaacataggccctcggccttactcagtcaaaattatttcaagccactcgggcaatagtaaaacatgatgcttaactcaaaagatcatttaaaatctcatttaagtgttaaagtagagtaaacacgactgagttatgaaaacagtagaatatagcgtgactaggttcaagtataaagtcaaaacagtgagaaaatatcagtaaaaatcccataagtgttcaaatagttggcacgaggcccaattatggcattcagcccaaaacatgatgataacaaacagtttttagtcaaatacgtggtaaaatagtcattcgggacggactaagtcacaatccctaacagtgcacgaccccatgctcatcatctagcgtgtgcgtcacctcaatatggtataacgatgtgcaatccggggtttcataccctcatgacatcatttacaattattactcacctcaatctagtccaaatctagcccgcaacgcctttgcccctcgaatcgtcctccgctcgcgtcgaatctatccaaaatcagaatcatgatgtcaaaatatgctaagggaatgaagcccatacgaaaataatcaatatacaacacaaatcccaaaattaccaaaatccgacccccgggcccacgtctcggaattcgatgaaatttacatcaataggttccttacaatccccacgagttcatacatatcaaaagtaccaaaatccgaccacaaatagtccctaaaaccctcaagtctaggtctccaatacaagccctagtttccctaattttaacccttaaattccattaattacggctctaattcgtgaaataataccataggaacgagttttaggtccaaaatccttacctcaatgaagttcccttgaaatcattcttcaaaatcgtccaaaaagctccaaagcctacttagaaatggtggaatagctcaaaaatcacgaaggaaacaatttatatgttctggcccagggatttcgcatctgcggccaaattcccgcttctgcggtattgcttctgcgctcaagaccaccgcatctgcggtcctcacttaagtcctcattttcgcatctgcaattcactatccgtgcctgcgccatcgcaggtgtggttctccaaccgcttctgcggtttctgcctccctatctcctttccacttctgcggccccctttcatcgcatctgcggcatcgcacctgcggtccccaatccgcaggtgcggaaacaacagaagctgaaaatctgcatcttcaccacgaattccaaactctctgtcaaccatccaaaatcaccacgaggcccccgggacctcaaccaaaagcacaaacatatcctataatcttattcaaacttataccaatctttaaaacacctcgaacaacatcgaatcaaccaaaacacatcaaattcaagcctacgtttccaaaaaccttccgaattatgcttttgatcaaaaacccaaccaaaccacgttcgaatgacctgtaattttgcacacacataccaaatgacataatgaaactactgcgactttcggaattccattctgacccctatatcaaaatctcacctatcaatcgaaaaacgccaaaaatccaatttcgctaattcaagcctaaatctactccgaacctccaaaatacatttcgatcacgctcctaagtcccaaatcacctcccgaagctatccaaaccatcgaaactcacaatctgagccctctaacacataagtcaatatccggttgacttttccaacttaagcttactcaaaagagactaagtgtctcaaaccttaccaaatccnnnnnnnnnnnnnnnnnnnnnnnnnnnnnnnnnnnnnnnnnnnnnnnnnnnnnnnnnnnnnnnnnnnnnnnnnnnnnnnnnnnnnnnnnnnnnnnnnnnnnnnnnnnnnnnnnnnnnnnnnnnnnnnnnnnnnnnnnnnnnnnnnnnnnnnnnnnnnnnnnnnnnnnnnnnnnnnnnnnnnnnnnnnnnnnnnnnnnnnnnnnnnnnnnnnnnnnnnnnnnnnnnnnnnnnnnnnnnnnnnnnnnnnnnnnnnnnnnnnnnnnnnnnnnnnnnnnnnnnnnnnnnnnnnnnnnnnnnnnnnnnnnnnnnnnnnnnnnnnnnnnnnnnnnnnnnnnnnnnnnnnnnnnnnnnnnnnnnnnnnnnnnnnnnnnnnnnnnnnnnnnnnnnnnnnnnnnnnnnnnnnnnnnnnnnnnnnnnnnnnnnnnnnnnnnnnnnnnnnnnnnnnnnnnnnnnnnnnnnnnnnnnnnnnnnnnnnnnnnnnnnnnnnnnnnnnnnnnnnnnnnnnnnnnnnnnnnnnnnnnnnnnnnnnnnnnnnnnnnnnnnnnnnnnnnnnnnnnnnnnnnnnnnnnnnnnnnnnnnnnnnnnnnnnnnnnnnnnnnnnnnnnnnnnnnnnnnnnnnnnnnnnnnnnnnnnnnnnnnnnnnnnnnnnnnnnnnnnnnnnnnnnnnnnnnnnnnnnnnnnnnnnnnnnnnnnnnnnnnnnnnnnnnnnnnnnnnnnnnnnnnnnnnnnnnnnnnnnnnnnnnnnnnnnnnnnnnnnnnnnnnnnnnnnnnnnnnnnnnnnnnnnnnnnnnnnnnnnnnnnnnnnnnnnnnnnnnnnnnnnnnnnnnnnnnnnnnnnnnnnnnnnnnnnnnnnnnnnnnnnnnnnnnnnnnnnnnnnnnnnnnnnnnnnnnnnnnnnnnnnnnnnnnnnnnnnnnnnnnnnnnnnnnnnnnnnnnnnnnnnnnnnnnnnnnnnnnnnnnnnnnnnnnnnnnnnnnnnnnnnnnnnnnnnnnnnnnnnnnnnnnnnnnnnnnnnnnnnnnnnnnnnnnnnntgaaccccagccaaccaacccgatcacatatagaaccgatagataaagaaataagaagcagaaaatggggaaaatggagtggtaactcaggagatactagtcggatcgttacatcctccctctcttaaataatcgttcatcctcaaacgagttaagaaccatacctgaagcctcaaacaggtgaggatatctgctccgcatctcccgctcagcctgctaggtcgcctcttccacgggctgacctccccactgcactttcactgaagctatatccttagacctcaactttcgaacctgacgacccaaaatagctactggctccacatcatagatcaaatcaccatccaactgaaccgtgctgaaatccataacatgggacggatccccaatatacttttcgagcatagaaacatgaaataccagatgcacactcgacaagctgggtggcaaagcaagctcataagccacctccctaatcctgcaaagcacctcaaaagccccaatgaaccgaggactcaatttacctttcttcccaaatatcataacacccttcatgggcaaaaccttcaacagaaccttctcgccaaccatgtaggacacatctcgaaccttcctgtcagcataacttttttgtctcgactgcgctgtacgaagcctctcctgaatcaccttcaccttttctaaagcatcctgcacccagtctatccccaatagcctagcctcacctagctcaaacgaaccaactggagatctacaccacctctcatacaaagcctcatatggagccgtctgaatactcaactggtttgttgtaataagcaaactctacgagagatggaaactgatcccatgaccctccaaaatcaatgacacaagcacacaacatgtcctccaatatctgaatagtgcgctcggactgcccgtccatctgagggtgaaaagttgtgctcannnnnnnnnnnnnnnnnnnnnnnnnnnnnnnnnnnnnnnnnnnnnnnnnnnnnnnnnnnnnnnnnnnnnnnnnnnnnnnnnnnnnnnnnnnnnnnnnnnnnnnnnnnnnnnnnnnnnnnnnnnnnnnnnnnnnnnnnnnnnnnnnnnnnnnnnnnnnnnnnnnnnnnnnnnnnnnnnnnnnnnnnnnnnnnnnnnnnnnnnnnnnnnnnnnnnnnnnnnnnnnnnnnnnnnnnnnnnnnnnnnnnnnnnnnnnnnnnnnnnnnnnnnnnnnnnnnnnnnnnnnnnnnnnnnnnnnnnnnnnnnnnnnnnnnnnnnnnnnnnnnnnnnnnnnnnnnnnnnnnnnnnnnnnnnnnnnnnnnnnnnnnnnnnnnnnnnnnnnnnnnnnnnnnnnnnnnnnnnnnnnnnnnnnnnnnnnnnnnnnnnnnnnnnnnnnnnnnnnnnnnnnnnnnnnnnnnnnnnnnnnnnnnnnnnnnnnnnnnnnnnnnnnnnnnnnnnnnnnnnnnnnnnnnnnnnnnnnnnnnnnnnnnnnnnnnnnnnnnnnnnnnnnnnnnnnnnnnnnnnnnnnnnnnnnnnnnnnnnnnnnnnnnnnnnnnnnnnnnnnnnnnnnnnnnnnnnnnnnnnnnnnnnnnnnnnnnnnnnnnnnnnnnnnnnnnnnnnnnnnnnnnnnnnnnnnnnnnnnnnnnnnnnnnnnnnnnnnnnnnnnnnnnnnnnnnnnnnnnnnnnnnnnnnnnnnnnnnnnnnnnnnnnnnnnnnnnnnnnnnnnnnnnnnnnnnnnnnnnnnnnnnnnnnnnnnnnnnnnnnnnnnnnnnnnnnnnnnnnnnnnnnnnnnnnnnnnnnnnnnnnnnnnnnnnnnnnnnnnnnnnnnnnnnnnnnnnnnnnnnnnnnnnnnnnnnnnnnnnnnnnnnnnnnnnnnnnnnnnnnnnnnnnnnnnnnnnnnnnnnnnnnnnnnnnnnnnnnnnnnnnnnnnnnnnnnnnnnnnnnnnnnnnnnnnnnnnnnnnnnnnnnnnnnnnnnnnnnnnnnnnnnnnnnnnnnnnnnnnnnnnnnnnnnnnnnnnnnnnnnnnnnnnnnnnnnnnnnnnnnnnnnnnnnnnnnnnnnnnnnnnnnnnnnnnnnnnnnnnnnnnnnnnnnnnnnnnnnnnnnnncaccatgcaatcgaacaatctcccgaatatagatctctgctagccgctctaaacaataagtagtacacacatgaatgaagtgcgcggacttggtcagccgatccacgatcacccaaatagcatcaaacttcttaaatgtccgtgggagtccaactaaaaagtccatagtgatcctctcccacttttactctggaatatccatccgcggaagcaagccacctggtctctgatgcttatatttcacctgctgacatttgagacaccgagctacaaatcccacaatgtctttcttcattctcctccactaataatgctgtctcagatagtgatacatcttcgcggtacccggatgaatggaataccgcgagctatgggcctcctccagaataaactcccgaaacccatctacattgggcacacatatctggcccatcatcctcaacaccccatcatcaccaatggtcacatctctggtatcatcatgatgaactttgtccctaaggacaagtaaatgaggatcatcatactggcactctctgatgcgatcatataaggaagaccaaaaaaccacacaagccaatacctgattgggctccaaaatatctaacctcacaaactgattggacaaggcctgaacatcaactgcaagaggtctctccccaactggaatatattccaaactccccatactcactgcctttcagctcaaagcatcggccaccacattggccttccccgaatggtacaatatagtaatatcataatcctttagcaactccaaccacctccactaccacaaatttagatccttttgcttgaacaagtgctggagactacgatgatcagtaaacacctcacaagacacaccatacaagtaatgtctccaaatcttcaacgcgtgaactatggcaaccaactccaaatcatgaacggggtagttcttctcatgggacttcaactgacgagaagcataagcaataactctaccctcctacatcaatatacacccaataccaactcttgaagcatcacaatacacggtatataaacctgaagctgatggcaaaactagcattggagtcgtgatcaaggctgtcttgagcttctgaaagctctcctcacactcatttaaccatacaaatgaagcacccttcggagtaaacttggtcaagggcggtgcgatagatgagaatccctgaacaaaccagcgataataacccgccaaaccaagaaatatgcaaatctctatggctgaggacggtctgggccaactctgaaccgcctttatcttcttcgggtcaacctgaataccctcactggacaccacgtgtcccaagaaagccactgaactgagccaaaactcacacttgaagaattttgcataaagtttctcctccctcaatctctgcaacacaactctcaaatgctccatgtgctactcctaactacgcaaatacaccagaatattgtcaatgaagaatttgacaatcgagtctagataagtaaggaacacgttgttcatcaagtacatgaatgctactggggcattggttagcccaaggtgataacctgaacagagatcaatcttgaagaacactctcactccctgaagctggttgaagaaatcatcaatatgaggcaaaggatacttattcttaattgttactttgttcaattgcctataatcaatgcacatccttataatgccatccttcttcgttacaaatagaactagcgcaccccaaggtgacacactaggccaaatgaacctcttatcaaggagttcctgaagttgcttctttaactccttcaaatctgctggtgccatacgatacgacataatagaaatgggctgagtgcccggcaccaggttaataccaaagtcaatatccctgtccggtggcatgcccggtaggtctgcaggaaacacatcatgaaaatccctcacaattagaacgaaatcaatactgggagtctctccaccgacatccctcacaaaggctagatacgaaagacaacacttcccaaccatacgttgagccttcaaaaatgagattactctactgggaacataatcagtcaaaccttgccactcaatctgtggcacacccggtatagccaatgtgactgtcttaacatgatagtccagaatagcatgacttgtagataaccaatccatgcccaaaacgacatcgaaatccaccatacacaataataaaagatctactagggtctccagatccccaatagtcactacagacaaccggtacacattgtctacaataatagtatcgcccatcaggatagatacatgaacaggtgaaacaagagactcacggggcatacccaaataacgagcaaagtatgatgacacataagaaaaggtggaaccaggatcaaataatannnnnnnnnnnnnnnnnnnnnnnnnnnnnnnnnnnnnnnnnnnnnnnnnnnnnnnnnnnnnnnnnnnnnnnnnnnnnnnnnnnnnnnnnnnnnnnnnnnnnnnnnnnnnnnnnnnnnnnnnnnnnnnnnnnnnnnnnnnnnnnnnnnnnnnnnnnnnnnnnnnnnnnnnnnnnnnnnnnnnnnnnnnnnnnnnnnnnnnnnnnnnnnnnnnnnnnnnnnnnnnnnnnnnnnnnnnnnnnnnnnnnnnnnnnnnnnnnnnnnnnnnnnnnnnnnnnnnnnnnnnnnnnnnnnnnnnnnnnnnnnnnnnnnnnnnnnnnnnnnnnnnnnnnnnnnnnnnnnnnnnnnnnnnnnnnnnnnnnnnnnnnnnnnnnnnnnnnnnnnnnnnnnnnnnnnnnnnnnnnnnnnnnnnnnnnnnnnnnnnnnnnnnnnnnnnnnnnnnnnnnnnnnnnnnnnnnnnnnnnnnnnnnnnnnnnnnnnnnnnnnnnnnnnnnnnnnnnnnnnnnnnnnnnnnnnnnnnnnnnnnnnnnnnnnnnnnnnnnnnnnnnnnnnnnnnnnnnnnnnnnnnnnnnnnnnnnnnnnnnnnnnnnnnnnnnnnnnnnnnnnnnnnnnnnnnnnnnnnnnnnnnnnnnnnnnnnnnnnnnnnnnnnnnnnnnnnnnnnnnnnnnnnnnnnnnnnnnnnnnnnnnnnnnnnnnnnnnnnnnnnnnnnnnnnnnnnnnnnnnnnnnnnnnnnnnnnnnnnnnnnnnnnnnnnnnnnnnnnnnnnnnnnnnnnnnnnnnnnnnnnnnnnnnnnnnnnnnnnnnnnnnnnnnnnnnnnnnnnnnnnnnnnnnnnnnnnnnnnnnnnnnnnnnnnnnnnnnnnnnnnnnnnnnnnnnnnnnnnnnnnnnnnnnnnnnnnnnnnnnnnnnnnnnnnnnnnnnnnnnnnnnnnnnnnnnnnnnnnnnnnnnnnnnnnnnnnnnnnnnnnnnnnnnnnnnnnnnnnnnnnnnnnnnnnnnnnnnnnnnnnnnnnnnnnnnnnnnnnnnnnnnnnnnnnnnnnnnnnnnnnnnnnnnnnnnnnnnnnnnnnnnnnnnnnnnnnnnnnnnnnnnnnnnnnnnnnnnnnnnnnnnnnnnnnnnnnnnnnnnnnnnnnnnnntagaggcatctctagggcaaactgaaacaatacctataataacagcatcaaaagcaatagcatcgggtctagatggaagtgcatagaaacgggcctgaccgccatctgatcgacctccccctttgggacggcctctagatacctaacctccacccctagctggctgggcaggtgatggtgaagtaactcgtgctgaagccgatgactgactcctctgctgagatgaacccgcaagacgacgaggacactgcctccacatatgacccatctttccacactcatagcaactctcgagtgctggagaaggggactgaagggacccctagcaccggaatgactagtagatgcacctagcatagaagatccctgaactgattgagcacgagataaactctaagctagaaaggcactaagtgatgactggccctgatgagaactgtgagaaccatgactcgatgatgccccatgataacctgggcgagctggctgagcatgcctaaatggatgccctctgccgtgctgaaactgacctctcgaaggagcactactctaactaccagatcctcgaggcctcttggcatccctctcctctcgctcctagcaatgaacaaactcaatctcactagcgatgtctacaacctcctcaaaagtcgcaccagtcacactctccctggtcatgagagtacgaagctgataagtaaggccatcaacaaacctcctactcctctctctatcaatccaaaccaaccaaatagcataacgagctaactcgaagaacctcatctcatactacatcatagtcatctctccctgatgcaaccacttaaactacctacgcagctcctctctatgagactgcagcacatacttctccaaaaagagaacggagaaatgctgctaggtaaggggtgctgcaccaataggcttacgcctctcaaaagtctcccaccaagtgaaggatgttctagaaaactgataagtagtgaaagcgaccacgctggtctccagaatacccgttgtacaaagcatcctctaacacttatccaagaaaccctgggcattctcgccatctgcaccactgaaggtcggaggctgaagccaaccaaacctctccaacctatgttgttcgtcctctagcatagcaggaaccacatagtcctgagcagctataaccggctcggctagatgcatccccggtgtctgaagtccctgcacgacctgctcaagtgtgcaagcggcgggagtttgagtgcctcctctagcctaagaagtagttgtggctgtactgactgaaactgcctgagctaggccagtgcatactgataaaatctgagccaaggcctcctgaagaccctgaatcacaatgggcacaactggtgcctgagctagtgctgctggagcgtccacaactgggacctgatcctgaactagggcgatagaaggattttgcaggtgctgctctagctactatgtgggccacacctatgtccctacggtaaccacgaccgcatcctcggactctagtggccacgctggtggtgctggtggtcgtccatcttgactggtagcgcgtgtcctcaccatctatgagagaatagaataacataagtttagtactcggatcaacaaattcgcaagacaagaatttcaagaatatgaaggtttccctaaagattctacagcctctcgaggataaatacaaatgtctccataccgatccacgagactatactaaacttgctcatgactcgagagacctatgtatcctaggctatgataccaacttgtcacgaccctaaacccggacccggtcgtgatggcacctctcataaagacaagggcatccgacactttcccatttcatttttaagaaattaaacaataagaattaattctaatacttaataaataaacccaaagtaagtagtgaatagtacaatgcagaagtaaaaccaacacaacccgataccggggtgtcactagtcatgagcatctacaatccgtatgatacaagaaaggtctacatagtctaatacaaatttaaaatagaggaagattagataacggaagaagctctaggctgcgaacgccggcagctacctagagaatcttcgaatctgcctgagctggaaaagattaatactcgctagcaggacctgatgcgcctgaatctgcacatggggtgcagggagtaaagtgagtactccaactcagtgagtaacaatcataaataaagactgaaagcaagaaatcatataaggcacattataggctataaggaagcagtaaaagccagtaaaacagtgaagtagtaaagatgtgtaaaattactagttcagtttacaacttcataaagtgcctttttaacaattaagcaagcaaatgacaggcaattaggaatgataaacacataaaggatcgcccctcgggcacagtgtcaacaaatccgcccctcgggcaatatctcaaaaacaatactagccccttgggctatatcttatatcacaatgggtacccgcactcactgggatgtgcagactcctagaggggccccttacggcctaagagtaatatcaagccatctcgtggcatcaccactaggccctcggcctcatatcaacaagccaccttgtggcgtacaaatctcaggccctcggcctcataatcataatcaggtgtttcctcacattataggccctcggccttactcagtcaaaattctcttaggccacacgggaaatagtaaaacatgatgctcagctcaaaagatcatttaaaatctcatttaagtgttaaagtagagtaaacacgactgagttatgaaaatagtagaatatagcatgactgagttcaagtataaagtcaaaacagtgaggaaatatcagtaaaaatcccctaagggnnnnnnnnnnnnnnnnnnnnnnnnnnnnnnnnnnnnnnnnnnnnnnnnnnnnnnnnnnnnnnnnnnnnnnnnnnnnnnnnnnnnnnnnnnnnnnnnnnnnnnnnnnnnnnnnnnnnnnnnnnnnnnnnnnnnnnnnnnnnnnnnnnnnnnnnnnnnnnnnnnnnnnnnnnnnnnnnnnnnnnnnnnnnnnnnnnnnnnnnnnnnnnnnnnnnnnnnnnnnnnnnnnnnnnnnnnnnnnnnnnnnnnnnnnnnnnnnnnnnnnnnnnnnnnnnnnnnnnnnnnnnnnnnnnnnnnnnnnnnnnnnnnnnnnnnnnnnnnnnnnnnnnnnnnnnnnnnnnnnnnnnnnnnnnnnnnnnnnnnnnnnnnnnnnnnnnnnnnnnnnnnnnnnnnnnnnnnnnnnnnnnnnnnnnnnnnnnnnnnnnnnnnnnnnnnnnnnnnnnnnnnnnnnnnnnnnnnnnnnnnnnnnnnnnnnnnnnnnnnnnnnnnnnnnnnnnnnnnnnnnnnnnnnnnnnnnnnnnnnnnnnnnnnnnnnnnnnnnnnnnnnnnnnnnnnnnnnnnnnnnnnnnnnnnnnnnnnnnnnnnnnnnnnnnnnnnnnnnnnnnnnnnnnnnnnnnnnnnnnnnnnnnnnnnnnnnnnnnnnnnnnnnnnnaatgatagcaaacaattttcagtcaaatacacggtaaaatagtcattcgggatggactaagtcacaatccccaacaatgcacgaccccacgctcgtcatctagcatgtgcgttacctcaatatggcacaacgatgtgcaatccgggatttcatacgctcaagacatcatttacaatcattactcacctcaatctagtccaaatctagcctgcgatgcctttgcctctggaatcggccttcactcgcatcaaatatatccaaaattagaatcacgatgtcaaaatctgttaagggaacgaagcctatgcgaaaataatcaatatacaacacaaattccgaaattaccaaaacccgacccccaggcccatgtctcgaaattcgaggaaattcacatcggtaggttccttatcttcccacgagttcatacatatcaaaagtaccaaaatccaaccacaagtggtccatcaaaacctcaagtctaggtttccaataccaagccctagtttccccaattttaacccttaaattccattaattacagccctaatccgtaaaataataccttaggaacgagtttaggtccaaactccttacctcaatgaagttcccttgaaatccttcttcaaaatcgtccaaaaagctccaaagccgacttagaaatggtggaatagctcaaaaaacgcgaaggaaacaatttatatgttctagcccagggatttcgcatcttcggtcaaattctcgcttttgtggtatcgcttctgtggtcaagaccatcgcatctgtggtcctcacttaagtcctcattttcgcatctgcgattcactatccgcacctgcgccatcgcaggtgcggttctccaaccgcttctgcagtttctgcctccctagatcctttgcgcttctgcagcccccttttattgcatctgcggcatcgcacctacggttcccaatccgcaggtgcggaaacaatagaagcagaaaatctgcagcttcaccaaaaattccaaagtctccgtcaaccatccgtaatcaccccgaggcccccaggacctcaaccaaaagcaaaaacatatcccataaccttattcaaacttatatcaatcttcaaaacaccataaacaacatcgaatcaaccaaaacacgtcagattcaagcctaagcctccaaaaatcttccgaattacgtttttgatcgaaaacccaaccaaaccacgtccaaatgacctgaaattttgcacatacatcccaaaggacacaaaggaactaatgagactctcagaattctattttgacccatatatcaaaatctcacgtatcaatcgaaaaacgccaaaaatctaattttgctaattcaagcctaaatatactccggacctccaaaacacatttttatcacgcttctaagtcccaaatcacctctcgaagcgatccaaaccatcggaactcacatccgagccctctaacacataagaaaacattcggttgacttttccaacttaagcttcctcaaaagagactaagtgtctcaaaccttaccaaatcctttctaagcccgagccaaccaacacgatcacatatagaactaatagacaaagcaataagaagnnnnnnnnnnnnnnnnnnnnnnnnnnnnnnnnnnnnnnnnnnnnnnnnnnnnnnnnnnnnnnnnnnnnnnnnnnnnnnnnnnnnnnnnnnnnnnnnnnnnnnnnnnnnnnnnnnnnnnnnnnnnnnnnnnnnnnnnnnnnnnnnnnnnnnnnnnnnnnnnnnnnnnnnnnnnnnnnnnnnnnnnnnnnnaatttggttagaaaattatgaactttgtacataattaaattagattttgctcattctcatacattcataagtatactcttgtgccatgtgctaatatgacttatctctaatgatattatcgctattttcttgggaaattcaggtttacacaagagatttttcaatgaagaacccagttcatcaagattatttggtacgtattctctactctgcatagtttgaaataattatatttatatcatgtttaagaaaagattcccattcaatatcaaaccccactgtacttatacattacaaaaatggactagtttgttcaaaagaggagtccaaactgcattaaatgcctagattgtagggaacctttccaatgtcttgtcaaacaggaattcagtttgattagacttctgagagactgtcgctacccaattaaacactcctctttaaattgattaggcttagtgnnnnnnnnnnnnnnnnnnnnnnnnnnnnnnnnnnnnnnnnnnnnnnnnnnnnnnnnnnnnnnnnnnnnnnnnnnnnnnnnnnnnnnnnnnnnnnnnnnnnnnnnnnnnnnaactttttaattcattaatctactcttcatcttttctcatcttcgaaacacacttaaactttcttttcttacttccaagcacagaaatggataacatctctgataatccctcttcaccacccaaggaaaacttacccacaccatatgatacaccttcaactactcccatctctaataaaggaagggtaaaaatgatggctcgcaaggttgttgttggtggagagcaaattaataaaatcaatgaaaatttgaaagcaaatagggaagaagaaccccaaaaacctgatgagtcattcaaatctacaactaagggggaagaaacagttccttctgagtgtgaacaggtaacgtctagccccaaagttaatcttgaaactttttttgtggttgctatgaatttgaagaatacgtttgttcttgtaggatataggccaggtgttgaaagtactaagtctggaaaggtgggtggtaaaaataaaaagagaaaagataaagagagagagggttatcgaagtactgtaaggggaatgggaaaaggagtgactgaatctttacgcactcatgttggtctaactaaagagtcaggtgctatggtagtttagggtgaggaatttgttgaaatagaggagagtctgagaaaaatagagggaagtgggtctggagaagttgctgaggggctggttcaactagggaaaatgtagatgaacctgttccatctgaacaggagtccctcacagacctactgaaaagagtgattgaaagctacaatccaaagaagaaacgaagtctaggagttaaaacccctggcaccactagagccaacaagaaaaggaaggttgtttattccatccctgtagaaattcctcccacaaaaggaagatctgctaggagttagaagaagcagagtgaggctgaactggacaaagccttagaagaaagtaaaagaaaagttgctactaagggcaagaaggagatggttgagcctgttgaggttgtttaaatttatgagatagacctggtccttcaagatgaagatgagatagaacaagtggagactgtgactccaaaagctaagataggcaagacttctacaaagaagtctacttcaaatacaaagtctattgttccatccactttgtctaaaagaaccaggttttctatgaaatcaagaaaggtaaaaatggtggaggaagacgaacagagtggagaagaagaagaagaagatgatgaagaagaagaataagaatccgatgttgagaaggacaagatggttaagcttgggaagagaaccatcttgaaaggtaggctgcttatcttcccacgagttcatacatatcaaaagtaccaaaatccaaccacaaatggtccatcaaaacctcaagtctaggtctccaataacaagccctagtttccccaattttaacccttaaattccattaattacagctctaatccgtaaaataataccttaggaacgcgtttaggtccaaattccgtaccttaatgaagttcccttgaaatccttcttcaaaatcgttcaaaaagctccaaagccgacttagaaatggtggaatagctcaaaaaacgcgaaggaaacaatttatatgttctagcccagggatttcgcatcttcggtcaaattctcgcttttgtggtatcgcttctgtggtcaagaccatcgcatctgtggtcctcacttaagacctcattttcgcatctgcgattcactatccgcacctgcgccatcgcaggtgcggttctccaaccgcttctgcggtttctgcctccctagctcctttgcgcttctgcggcccccttttttcgcatctgcggcatcgcacctgcggttcccaatccgcaggtgcggaaacaatagaagcagaaaatctgcagcttcaccacaaattccaaannnnnnnnnnnnnnnnnnnnnnnnnnnnnnnnnnnnnnnnnnnnnnnnnnnnnnnnnnnnnnnnnnnnnnnnnnnnnnnnnnnnnnnnnnnnnnnnnnnnnnnnnnnnnnnnnnnnnnnnnnnnnnnnnnnnnnnnnnnnnnnnnnnnnnnnnnnnnnnnnnnnnnnnnnnnnnnnnnnnnnnnnnnnnnnnnnnnnnnnnnnnnnnnnnnnnnnnnnnnnnnnnnnnnnnnnnnnnnnntccaaaaatcttccgaattacgtttttgatcgaaaacccaaccaaaccacgtccaaatgacctgaaattttgcacatacatcccaaaggacacaacggaactaatgagactctcagaattctattttgaccacaatatcaaaatctcacgtatcaatcgaaaaacgccaaaaatccaattttgctaattcaagcctaaatatactctggacctccaaaacacattcttatcacgctcctaagtcccaaatcacctctcgaagcgatccaaaccatcggaactcacatccgagctctctaacacataagacaacattcggttgacttttccaacttaagcttcctcaaaaaagactaagtgtctcaaaccttaccaaatcctttttaagcccgagccaaccaacacgatcacatatagaactaatagacaaagcaataagaagcataaaagggagaaaacagagtggtaactcatgagacgactgnnnnnnnnnnnnnnnnnnnnnnnnnnnnnnnnnnnnnnnnnnnnnnnnnnnnnnnnnnnnnnnnnnnnnnnnnnnnnnnnnnnnnnnnntatttggttagaaaattatgaactttgtaactaattagattagattttgctcattctcatactttcataagtatactcttgtgccatgtgctaatatgactcgtttatctctaatgatattatcgctattttcttgggaaattcaggtttacacaagagatttttcaatgaagaacccagttnnnnnnnnnnnnnnnnnnnnnnnnnnnnnnnnnnnnnnnnnnnnnnnnnnnnnnnnnnnnnnnnnnnnnnnnnnnnnnnnnnnnnnnnnnnnnnnnnnnnnnnnnnnnnnnnnnnnnnnnnnnnnnnnnnnnnnnnnnnnnnnnnnnnnnnnnnnnnnnnnnnnnnnnnnnnnnnnnnnnnnnnnnnnnnnnnnnnnnnnnnnnnnnnnnnnnnnnnnnnnntgtacttatacattacaaaaatggaccagtttgttcaaaagaggagtccaaactgtattaaatgcctagattgtagggaacctttccaatgtcttgtcaaacaggaattcagtttgattagacttctgagagactatcgctacccaattaaacactcctatttaaatttattaggcttagtgtattcttcacttaaactttttaagtcgttaatctactcttcatcttttctcatcttcgaaacacacttaaactttcttttcttacttccaagcacagaaatggataacacctctgataattcctcttcaccacccaaggaaaccttacccacaccatatgatacaccttcaactactcccatctctaataaaggaagggtaaaaatgatggctcgcaaggttgttgttggtggagagcaaattaataaaatcaatgaaaatttgaaagcaaatagggaagaagaaccccaaaaatctgatgagtcattcaaatctacaactaagggggaagaaacagttccttctgagtctgaacaggtaacgtctagccccaaaattaatcttgaaactatttttgtggttgctatgaatttgaagaatacgtttgttcttgtaggatatatgccaggtgttgaaagtactaagtctggaaaggtgggtggtaaaaataaaaagagaaaagataaagagagagagggttatcgaagtactataaggggaatgggaaaaggagtgactgaatctttatgcactcctgttggtctaactaaagagtcaggtgctatggtagtttaggttgaggaatttgttgaaatagaggagagtctgagaaaaatagagggaagtgggtctggagaagttgctgaggggctggttcaactagggaaaatgtagatgaacctgttccatctgaacaggagaccctcacagacctactgaaaagagtgattgaaagctacaattcaaagaagaaacgaagtctaggagttaaaacccctggcaccactagagccaacaagaaaaggaaggttgtttcttctatccctgtagaaattcctcccacaaaaggaagatcttctaggagttagaagaagcagagtgaggctgaactggacaaagccttagaagaaagtaaaagaaaagttgctactaagggcaagaagaagatggttgagcctgttgaggctgtttaaattgatgagatagacctggtccttcaagatgaagatgagatagaacaagcggagactgtgactccaaaagctaagataggcaagacttctacaaagaagtctacttcaaatacaaagtctattgttccatccactttgtctaaaagaaccaggttttctatgaaatcaagaaaggtaaaaatggtggaggaagacgaacagagtggagaagaagaagaagatgatgaagaagaagaagaatctgatgttgaaaaggacaagatggttaagtttgggaagagaaccatcttgaaaggtaggctccttatcttcccacgagttcatacatatcaaaagtaccaaaatacaaccacaaatggtccatcaaaacctcaagtctaggtctccaatatcaagccctagtttccccaattttaacccttaaattccattaattacagctctaatccataaaataataccttaggaacgagtttaggtccaaactccttacctcaatgaagttcccttgaaatctttcttcaaaatagtccaaaaagctccaaagccgacttagaaatggtggaatagctcaaaaaacgcgaaggaaacaatttatatgttctagcccagggatttagcatcttcggtcaaattctcgcttttgtggtatcgcttctgtggtcaagaccatcgcatctgtggtcctcacttaagttctcattttcgcatctacgattcactatccgcacctgcgccatcgcaggtgcggttttccaaccgcttctgcggtttctacctccctagctcctttgctcttctgtgaccccctcttatcgcatctgcggcatcgcacctgcggttcccaatccgcaggtgcggaaacaatagaagcagaaaatctgcagcttcaccacaaattccaaactctccgtcaaccatccgtaatcaccccgaggcccccaggacctcaaccaaaagcaaaaacatatcccataaccttattcaaacttataccaatcttcaaaacaccttaaacaacatcgaatcaaccaaaacacgtcagattcaagcctaagtcttcaaaaatcttccgaattacgtttttgatcaaaaacccaaccaaaccacgtccacatgacctgaaattttgcacatacatcccaaaggacacaacggaactaatgagactctcggaattccattttgaccaatatattaaaatctcacgtatcaatcgaaaaacgccaaaaatccaattttgctaattcaagcctaaatatacttcggacctccaaaacacattcttatcactctcctaagtcccaaatcacctctcgaagccatccaaaccatcggaactcacatccgagccctctaacacataagacaacattcagttgacttttccaacttaagcttcctcaaaaaagactaagtgtctcaaaccttaccaaatcctttctaagcccgagccaaccaacacgatcacatatagaactaatagacaaagcaataagaagcataaaagggagaaaacagagtggtaactcatgagacgactgaccgagtcatcacagaaccagttctaactcaaaaatttggttagaaaattatgaacttggtacataattagattagattttgctcattctcatactttcataagtatactcttgtgccatgtgttaatatgactcgtttatctctaatgatattatcgctattttcttgggaaattcaggtttacacaagagatttttcaatgaagaacccagttnnnnnnnnnnnnnnnnnnnnnnnnnnnnnnnnnnnnnnnnnnnnnnnnnnnnnnnnnnnnnnnnnnnnnnnnnnnnnnnnnnnnnnnnnnnnnnnnnnnnnnnnnnnnnnnnnnnnnnnnnnnnnnnnnnnnnnnnnnnnnnnnnnnnnnnnnnnnnnnnnnnnnnnnnnnnnnnnnnnnnnnnnnnnnnnnnnnnnnnnnnnnnnnnnnnnnnnnnnnnnnnntatacttatacattacaaaaatggaccagtttgttcaaaagaggagtccaaactgcattaaatgcctagattgtagggaacctttccaatatcttgtcaaacaggaattcagtttgattagacttctgagagactgtcgctacccaattaaacactcctctttaaattgattaggcttagtgnnnnnnnnnnnnnnnnnnnnnnnnnnnnnnnnnnnnnnnnnnnnnnnnnnnnnnnnnnnnnnnnnnnnnnnnnnaactttttaagtcgttaatctactcttcatcttttctcaacttcgaaacacacttaaactttcttttcttacttccaagcacagaaatggataacacctctgataatccctcttcaccacccaaggaaaccttacccacaccatatgatacaccttcaactactcccatctctaataaaggaagggtaaaaatgatggctcgcaaggttgttgnnnnnnnnnnnnnnnnnnnnnnnnnnnnnnnnnnnnnnnnnnnnnnnnnnnnnnnnnnnnnnnnnnnnnnnnnnnnnnnnnnnnnnnnnnnnnnnnnnnnnnnnnnnnnnnnnnnnnnnnnnnnnnnnnnnnnnnnnnnnnnnnnnnnnnnnnnnnnnnnnnnnnnnnnnnnnnnnnnnnnnnnnnnnnnnnnnnnnnnnnnnnnnnnnnnntgtgaacaggtaacgtctagccccaaagttaatcttgaaactatttttgtggtttctatgaatttgaagaatacgtttgttcttgtaggatatatgtcaggtgttgaaagtactaagtctggaaaggtgggaggtaaaaataaaagagaaaagataaagagagagagggttatcgaagtactgtaaggggaatgggaaaaggagtgactgaatctttacgcactcctgttggtctaactaaagagtcaggtgatatggtagtttagggtgaggaatttgttgaaatagaggagagtctgagaaaaatagagggaagtgggtctggagaagttgctgaggggctggtnnnnnnnnnnnnnnnnnnnnnnnnnnnnnnnnnnnnnnnnnnnnnnnnnnnnnnnnnnnnnnnnnnnnnnnnnnnnnnnnnnnnnnnnnnnnnnnnnnnnnnnnnnnnnnnnnnnnnnnnnnnnnnnnnnnnnnnnnnnnnnnnnnnnnnnnnnnnnnnnnnnnnnnnnnnnnngaaagctacaattcaaagaagaaacgaagtctaggagttaaaacccctggcaccactagagccaacaagaaaaggaaggttgtttcttctatccctgtagaaattcctcccacaaaaggaagatctactaggagttagaagaagcagagtgaggatgaactggacaaagccttagaagaaagtaaaagaaaagttgctactaaggacaagaagaagatggttgagactgttgaggctgtttaaattgatgagatagacctggtccttcaagatgaagatgagatagaacaagtggagactgtgactccaaaagctaagataggcaagacttctacaaagnnnnnnnnnnnnnnnnnnnnnnnnnnnnnnnnnnnnnnnnnnnnnnnnnnnnnnnnnnnnnnnnnnnnnnnnnnnnnnnnnnnnnnnnnnnnnnnnnnnnnnnnnnnnnnnnnnnnnnnnnnnnnnnnnnnnnnnnnnnnnnnnnnnnnnnnnnnnnnnnnnnnnnnnnnnnnnnnnnnnnnnnnnnnnnnnnnnnnnnnnnnnnnnnnnnnnnnnnnnnnnnnnnnnnnnnnnnnnnnnnnnnnnnnnnnnnnnnnnnnnnnnnnnnnnnnnnnnnnnnnnnnnnnnnnnnnnnnnnnnnnnnnnnnnnnnnnnnnnnnnnnnnnnnnnnnnnnnnnnnnnnnnnnnnnnnnnnnnnnnnnnnnnnnnnnnnnnnnnnnnnnnnnnnnnnnnnnnnnnnnnnnnnnnnnnnnnnnnnnnnnnnnnnnnnnnnnnnnnnnnnnnnnnnnnnnnnnnnnnnnnnnnnnnnnnnnnnnnnnnnnnnnnnnnnnnnnnnnnnnnnnnnnnnnnnnnnnnnnnnnnnnnnnnnnnnnnnnnnnnnnnnnnnnnnnnnnnnnnnnnnnnnnnnnnnnnnnnnnnnnnnnnnnnnnnnnnnnnnnnnnnnnnnnnnnnnnnnnnnnnnnnnnnnnnnnnnnnnnnnnnnnnnnnnnnnnnnnnnnnnnnnnnnnnnnnnnnnnnnnnnnnnnnnnnnnnnnnnnnnnnnnnnnnnnnnnnnnnnnnnnnnnnnnnnnnnnnnnnnnnnnnnnnnnnnnnnnnnnnnnnnnnnnnnnnnnnnnnnnnnnnnnnnnnnnnnnnnnnnnnnnnnnnnnnnnnnnnnnnnnnnnnnnnnnnnnnnnnnnnnnnnnnnnnnnnnnnnnnnnnnnnnnnnnnnnnnnnnnnnnnnnnnnnnnnnnnnnnnnnnnnnnnnnnnnnnnnnnnnnnnnnnnnnnnnnnnnnnnnnnnnnnnnnnnnnnnnnnnnnnnnnnnnnnnnnnnnnnnnnnnnnnnnnnnnnnnnnnnnnnnnnnnnnnnnnnnnnnnnnnnnnnnnnnnnnnnnnnnnnnnnnnnnnnnnnnnnnnnnnnnnnnnnnnnnnnnnnnnnnnnnnnnnnnnnnnnnnnnnnnnnagaagaagaagaagaagaatccgatgttgagaaggacaagatggttaagtttgggaagagaaccatcttgaaaggtaggctcctcaggaacttagaggaggaaggaatggtaatgcttctggagaagttacaggtgcaaggatggaaggacatggtctttcagatgatggaaggttggccataactgatattgtgcagtttatggcaaattgtgagatcaagatggtagggtcaccagtgtggtaaagggtgatggtgacttttgatgagaaagagctgagagagatcttggggtgcattctaaaggatacaatgactataagaagctcaaatggacaagcctagagaatctccctactgcccttgccagtactagaaaattttgtgacaatgaggaggaaattgagcccaaggctatttacaaaaatgagatgaagccacccaacaaagtgttgctccaatttgtaaacaaatgtgtgctgccaaggtaggaaaggaggcacatttccacattcatggacctggtccttatggaatgtttggacaataggcggcaaataaattggcctgggtctaaaattcagcttcttgacagggttctaaatggaactaagacttatgtcataccctatggttttattctcacgattgttcttgcacatttaaaggtacccatcaagaaatgggaagttggtacaaacaaggatcattttggggctaacactttgactgcttgtaactatgaggctcaaatcactcccaaaaaacctggttcatccaaaaaggtaccagtgaatagcaaagtgcgagttttggtgcaagaaagtagggcaaaggatgctgagcctgataggctaaagaagaggttggctgaaatggagaccgagagagatgctctcagagctgagcttgcaaaagagaatgagaagaattagggcattcttcaggatatgctgaaactgctccaagccaaaaaccaagaacctggtccttcccagccttaatcctcctaacctactgtagatcaaccagtgacccagcttaggatttttttgtttcttttgctcatgatccaatgttcttattctttttatgctttgtagtaggatcttatcaatcaatgaaatttactgccttttgctctagctgtttgttgatatttcttagatgactaatatccttagatttatagatgatgcttaaatctatgattgcatttgaagtagcctagtggccatgattaatttctatttaaatttggttatctcacataattatgcaacttttcgatgatgccaaaggaggaattaggttgtgctttttctttggactgtgatgtttataacctaatgaacctggtccttgataataagtgataaaatgttctaacattgtgttgatgttgagctgagttgaaacagggcttaagcttatgaaaagcacagattttgtcatcatcaaaaagggggaatttgttggcccaaataaaggtttgttttgaagattgacaaaggaagatcaggcatgaaccaggaccccttatgaacatagacacgggcagatttgagtatatgagatgcatgtgaaggagataagtttaacttggtatatttgatatctcctgatcaaaaagattacataattgataaggagaaggactccttactcaaagagaacactatccaacataagaaaggagataggggttgaagttaactagaactcttccaccaaggaagagtagcattagaactctagttattttctactctactaactctataaatcgcatgatgttctcactttacaggtgatgcacacatactgaagttaagaatgaaatgagtgcaaaatagcaaggcattttgtgagcaattcctgtgagttttaagagtgagatcctgaagctacacgaaccagattgaaaaaccagctttataaagagttttatgtgtctttctttatttttagttcaaagtgtagtatgcattttgagctgtaccttttagctttcttagaagcaaattgtactaggtacttgagttgtatcattcaagttagagttaacttgaagtagtcacaacagcttgtagcatgttgctataagagttagagttaatccttaggtttgcaaaaggttgtaaactcgagttgtattattcaagttagagttaacctgaatcagtcacaacagcctgtggatggttgctataagggttagaattaatccttaggtttgcaagagtttgtaaacattgttgttggctctgagttgtagtaaagtgtttagagaaaatcctactgggtagtaggtcgtgattttttcaccttttgagacgggtatttttcacataaatatctttgtgttttttactttctgcatttattattctgcaatagtagtataaagaacacatagaagaactaggtccttttataatctggtgcacgcaaaaaattagacaccacataaatcacctccctcttgtgtggtattgaagtataaaacatcaattggtatatgagtgggttatccttgaagaggctaacactaggatttgaacattctgggtgccataaattttgaacgtagacatatcataatttatatgctccaaatagggtaacatttagtcggttttatctatttgtatttctctcacgacctggattttccaccatcgggagttgtaatggcgcctactagtgaaagctaggcaagccaaccattgagcaatttacctttttcccatttttaatactttaataatgataaactaacagtttataaacagcgaaatttaaataagcggaagaaaaacaaataaaatcatttaattatttccaatacaatttcttaaataaggactacccagaactggtgtcacaacttcacagacggtctaggaatacaataatcaaggtctaaaaaataaatacaacattgtttctgaaacacgtaaatgaaacatgacaaaaggatagagggagatgccagggcctgcggacgcctgcaggactatcttggatctctgtatggactgaaggcagcaacccaaaagctaaggtccaaaagttattgcgtcgggatctgcacacagtgcagagtgtagtatcatcacaactgaccctatgtgttggtaagtgcctagcctaacttcggcgaagtagtgacgaggctaggaccagactaccaaataaatctgtgcagttatatcatatatagaggaaaataacagtaggggtgtacagttaagaatgggaggggggaacatgttgcgtggaaacatcaaatgataatagaaggacaacaggtaattacaaggaacatcataactcaattatcaacaagaatcagaaatcaaacaagtgcacgatatcacccttcgtgtttttactctcgtcctcaccataagagtcaatataatgtacacgacatcactctacatgcttttactctcatcctcaccataaaattaatataatcggcactgaattgtatatcgtgcggcacggcatcacccttcatgcttttacactcttcctcacaaaaattatacacggcatcacccttcgtgctttaacactctctcaccaaaacaatgtacgacatcacccttcgtgctttactcttcctcacccaatcaacaatcataaaaaataatggaaaggaaataaatgaaatcataataaaatcccagcaaggaaataatagtacacaatcatatcctggcaaggaacaatatcaagaacatcaatatcccggcaagggagatagcactaaaagcaacaacatctcgacaagggagacaatataataatcctcttctctttttcacgtttacttcacaactcactacacaacttgagccaatgctctattaggttcaattactaattttacttccacaattcttttacaacttgagccaacactcctcaatattcaattaccaacactacttccacaagctttgctcaacaatgaaatcatcattaaaggcatgaacaatacaaacaaagtcataataatcataatataagactcacgggcaagcttgacaccaaggtgtagatactctgtacgcggcaaaatcagaagacttgatttctggctgtcgagtcatttcggaagcatgccttgggaccccgaggatgggaggccacaatcgagttcccaacctcggggctcattgaagcctgactcataagaaatggagatcgaagccaggacagatggggaagctcccaaggcacacgactaattctgacagggccggcctatccagagcctatgttgaggcatcacgtcaagccatcatatccccatactttgtaattaatctctacatacttgtagtcgagtcccccctcttatataaaggggactcatcctaccttgtaagggcctgatgttgctccatttctccacaagtgcaataatatatctctctcttttctttctagcttgttcatcctcactggcccgaggccgctttaatatatatcgtccttttacttgttcttcaatatatagctcattattggctgaaaagagccttgcttcatcgtatccttaattgttatcccattcctggctgcccccgatagctcgagcccgactcaaacctcgaccccgaggtcctctctgaccggtcctgcatccgggcaacaggccccttcggtttctttactgcctcattttagctcacacttcatcgttaaacctcacaatcttagcatcatctgctctaacaactagctcgagatcatgtatttttagaatctcatttacaaatttaattgttgttaccattttcacggtaaacagtttggcgcccaccgtagggctaaaaataatagtgattattttattgctggttttattgcacaaatacacactatctttcacactttttcttgtccaagatcctttgatttcaggttaaaatgtccggctcggtaagcaaagtcgagaatgactaccccaaaaatcacgacgaaaatggtatggctgttccagtggctggcgtgacaccgcagtaccccgataacacatctggatcaattcaagcggacgcgggcttgcaaggcgcacaataggtcgatgaagcctcgcgcaccgatggtagcatacaacatatcgaccaacaggaagctcaaaaacccccggcctgggaagaataggaagttagtattcatgttatttttggaatgttgcaggcatagtagtttgctatcgctcagctgcaaagccacccagagactcccagcgtagtagccccgaaaacatctccctacgccgagcgagtacccgggagatcaagcaacaacggatcggtaaccgaccccaggatgcttgggaatctcttcgaaaggatcgagtcaggttcgtggaagttcttacagcaaccgtctcctaaggaagcggtcccggaactctcttcacggaaatctggaacgccaaaactccctaggtgcgataggaccttgggtccctacgagcgcaccaccgcttacacgtgcttattcaaaggcagagacctccataatgatgagtgtgagtctgactcattgaggaagttcgaggaaacactctcgaaaaaaaccttgatgcagcaccgcagcctggcacctggcctcgcaaactcgcttaccatatcagcagaccactccacgggagcacacaccgatgttatcgaagcagtaacaaaagggctcgacacacctggggctagacaaagagagagtgaagcactacaagaagtcgcgtctcgttccctgttaggatgaatgagatcgctcccggtttcggatgactggacaacccgggcctccgcccgaaggttaaacgaaatatgcccgacgactccaggacatttcaaacaaatcctgaccagatacccagtcgagatatggtcggatacacgcacctgacactatccacggagcagggccgtggacttccgtccaggaacctcctcaggtttggtatgccgacaaagaagatgatgccaaacaaatggaggtaccctccatgcaccgcgaatggaaggaacgacatgagttgttacttacctcccaatgatagagaaatagctcgagggaaacatccccgagaaatctccaatggaaccagatttgacaaggcacagctagcaggggaaccccgctcagctaagtacaatttcaacattgctttaccgaacatcatgatcaccttaagctaaaacaagaacgataggcgactcaaacctattctaccaagaccccttcaaaagaaccatagcccgacgcagaaaccgtagggcgcgcacagctacggagtaaaaaatggccacccgctcaaaagaacgacaaccgtgctattcaataaaaatcaccaccgagtatcgtcgagcggtcaggctcgaatccaactccaagggaggaaggagaccgggaagaatgaagatgacaagccacgatgtattaccacgacagtgaaggggcggcgacacccttcaaaggccataaaatgtaaagtgaaaatgctcatcaccggggaaacactggtctggggaatattccaaaggacacccttgcttccaaggaaagggacgccgagacttcgcctcggcctcgtattgatgtgttggtaaccctctcactcatttgacctattccaaataaaacatgtgttcatgaatacaggttgttcaattaattataccaacgatgtcaaaccaaagccaatggggcgattcggactaacgaaccaagtcactcccacatctcgaatctttgacagattctaggcaccgatcgccacatcaggaagaccactcccttaatacaacccgtatcagctcggactggaatgccgaacacgcaaggcacgtacgtcttattcagatgacaacgggcacgcctccccggaggcaacttcgaccctactccaccaaatggatgaaaccccaggacaagggtgggactaaagtattcgacaaggagctgcacacgacgagaggaaaaccctcaccatgtaacgcatcgccggcatcaatacgtccgccctcaaaaggatcaaagggtaagcagaatcgcatcttctgctaagcttggttgaacacagcagaaggctgtattagggctcgtgcctcggaacagcagaaacatcccgaacctcgaaaggttacctacgcaccccgcggtgaggaggaactacttcactccttcattattttttcactaacttatatgcaggcaatcagccggggcattcgaaagttctaactccacacggagatccaaggccttagcagggcccgttgtgctctattccctcgatcagactttagacccaaagagggtcccgccaaaaagattattagcagagcagtgtacccccaaagagggtcctgccagcaggatacgacaaaatcacatgccttcttctacaatcgaacgacgggcgatgatcttctttcaagggcaccattccctcagaaggaccgaaaatatcagactgagtgtcaagagggaaccttgtaacgaatcagatggtccgaagagtcgtacctacgtgggccgagctcacaacgacgagagaacatgtatttacaacatatatttatgacaagtaataaagaatatcttttcggcatttcgtacttcggaaaaggggatttcaacatactcatggcaagggcctctctaccgaatgcatcccgagatactcggagacttagcatcagcaattcaatacccgcacgaccccagggttagaactccgggctcaacaagcccctacaaggcaactccgagctcatgaggagcggtcttcaagcttaaacaaattatatgactcagagactgccattgatcgtcatatgctggaaaaatcgaaactgtgagacccctagcaggcagcctcaacgtaaccagatctattatatattacacaaactataagaccttaacaggcatgataaactgtaagacctcaacaggcatgacaaactataagacctcaagaggaatgattaactgtaagacctcaacaaacatgaaaatcctgaagtttaggttatacgtcgcatgtgtaaaaatccctaaagggcataccctcggtgtagacacctaaactatcaatcgggattaaaaatggctacggccaaacgcacatgactatgatcaaaacggttaatacagccaaaataacatgactcggggacacccgactgttactaaaatctcaggacactactccaaatatacttcgaaaagaaccggttaaaatagggttcccttaacaggcaaaaacgaaccccgaccatgtcgactccaaaccgccaaagtgttgatctactcaacctacgagctatgaaccttttgaggtgctcaaaacatcgccgacaacgacttgaaatcgaagttcctctagaaccgaagacgggtcaagcaaaaatattccaaaagaccttaacgagcagaaaacaaagcctacaaaaaagcccacaggcaaaaacagcgtaagagccattgtcgccatctaagcaagcctccgggccatatattaaaaggtctctacgaccaaacagcgtaagagccattgtcactagctaaaatttgacaacttgaggattaaaatgagctcaaatcgtaacccggttcagagatcggatccaaaatagttaactatgcaaacctccgagccacatattgaaaggtctcaacgaccgaaatagcgtaagaggcactatcgtcagtctgaaaaccagaggtacttaagggtcaataaaagatcaagtcacaacgcgactcggaggcttgacccggaataattaaactacaatatgcctaagggcacgacataaatgccactatcgccagccgagcaaatctccgggccatgtgccagtaaggtcatttcgacccggagcacaaaaggccatcatcatccgcctatgcaggcaggaaagagcttgagggtcaattgaagctcgagtcacagtacgactcggagactgaatccaaaatagtcgaaacggcaaatgcccaagagcaagaaataaaaataattaatgcctgcccgagcgggcataaaagattcaagggcaaaaggcttgagacgaagcccgactcagagactaagcctaaaacagtcgggccaagcatggaggccccagcaccagctcacgtaagggattacacttaagagcccctaggtctatccgaccagttccggacctacgaggatcccgccaaacaccaaaaccggcctgcccagtcgaaaagcaataacaaaaaagaggtacagaaaaaataaagcttcaagtttcttcctacatattatatgcgcgaaaagggcgcattctccatctacaagcatgctctacatatatcagaaacaaagcgacaaaatggcgaaatctacactccgcactaaagggctacaacttgtcaaattctccctccgcgacgtcagcaagaagttacagagcgtcgcgctcatccacccttgctcgagccaattctttcgagagaacgaagccccgtacactggcctcctcgagtacctctctccgagatctgcaacgaacatactcctcgatcctcttctcccggtcgagggctcgctttagctcagcttgggcatcagcaacatccttcatatgaatcgccatctcctgatcagccttggtccggcttagcgccactttagcctgggcattaattatctcagctctgaccttcaagagatcagattcgagtttcccaatcatgtccgcttgaactttggcgttatcacgagtcaagcagagttgggcctcgatggcagggaccctggctgaggcacatatctcctctaaagctcaagcttgctcttgagcccttagctccccacaaacaactctgacgcggttgacgtcgcctttgaggtactccaaggcctctgcctttttttgcagctgatataacaaaaggggtgagccttaaggttagagaggagcaaagcgcatactatataaagttacctgctctatcaaacaactctcatagtttgagctctgatacgcctcatatcgccaacgtgccaacttagccccattctcttggctaaggagcctaaaggactcgccatcgttcaagaatttctggagcctggccccttgacagagcagcttagacataagcccatcacaggcctatgcaaggaaaactcaataaagggaggagggcgtgacatacaggaaaaaacgcgcctaaactcacctcgaagagaagccgatggacttcctctaagccagaacacattcctgttgatcctgcctctccggccccaggagaaccaacctcgggcagagcatattcactcggaggaatcgccgcccgggaatctgatactccgggaacatcaggctcagacgatgccctctactcaaagatctgagcccgcccaatgccactaaaagctccatcacaccgcgggtgccgatcccccttatcaccatcctccctcggcttggaggctgacgactctttctcctcttcggaagaacactgtctcatcccaaacaaccgccctgtatctacaaacggtgaatccagtacaaatgaaaggggaaaatattacctcgaatatacgaaggccaagtcaaaggcaacatacgcacataccttggtatttcactccccatttggtacgaaatacagctcgccacctgcgctcgtcgcaagtcgaatgggtcgccaacttatggacccagacgggaaggtcaaggactttgcccggcatccacgaagttgctgcaacaaggtagacaacattattactcaactgattttcgctataggcaaaatttaaaaaagcgccagacactccactcacgtgcatgattccacccttcaggaaatggcaaaagccctgttgggataatgtcagcagtttgagcctgaataaaccaactggcccactctcggtccttgtcttcttcatcatcgacaacaaagggcgtggacaaacggcacctcagagttagcaggcctcgataatgaaatggccggtatagtctaacgaggtgattaaacgtgaattcgagcccaaccttctccacgaagaacctcattatcattaccattcgccgaaacgatggataaatctgcgccagagtaactcgatacttcaagcaaaaatcaagcacaaccctagcaggggggccaaatgcgaaagggtataggtatacgctcaaaactccatcagtggagtctgtaatacccttatttggagaaagcacctgcagtgttaccccctcgctccacccgcagtaattcctcaccatctccaggtgttcccctcttatcaaggatgccgtcttcaaagcaaactccttcggttcttgagcgctgggagcaannnnnnnnnnnnnnnnnnnnnnnnnnnnnnnnnnnnnnnnnnnnnnnnnnnnnnnnnnnnnnnnnnnnnnnnnnnnnnnnnnnnnnnnnnnnnnnnnnnnnnnnnnnnnnnnnnnnnnnnnnnnnnnnnnnnnnnnnnnnnnnnnnnnnnnnnnnnnnnnnnnnnnnnnnnnnnnnnnnnnnnnnnnnnnnnnnnnnnnnnnnnnnnnnnnnnnnnnnnnnnnnnnnnnnnnnnnnnnnnnnnnnnnnnnnnnnnnnnnnnnnnnnnnnnnnnnnnnnnnnnnnnnnnnnnnnnnnnnnnnnnnnnnnnnnnnnnnnnnnnnnnnnnnnnnnnnnnnnnnnnnnnnnnnnnnnnnnnnnnnnnnnnnnnnnnnnnnnnnnnnncacccccccccctgttccctgccgaatcggccctgaagtggtttccatgactatggtaaaactaatagttcaaagcaagggcgtgcaccagcactttttatnnnnnnnnnnnnnnnnnnnnnnnnnnnnnnnnnnnnnnnnnnnnnnnnnnnnnnnnnnnnnnnnnnnnnnnnnngcctggagagatgaagtaccctgtgccaaagcaggaaatcgtctatctaaaaatagtgaggtcttgcgaagaagccgaagccgccccacatatatgcgagaagcagcgacgactcgcctacccgatgcgagacccggggagccgacagcctcgatacagatcgacaaatcgatacccaatctagatagaatccttcaatgagaagtcaagacccgaggggccatccatattatctccaagctcgagacaacatcctacctcgaggatccctgacccaaagaagtcggacttcgggaagttttgtaacaccagcactcgatgcagggcaagtacctggtctcgtgattccctctttctaaaaagaggaataaatgtaggaagctccaatctcgaaagctccacaaaggtctgaggcagcaggaaactcctcagcataagtctatcctatacgctttaaaaaagggagggctatctacatcaagattaaaagggaccctcgggtacctgaagctgaccttcatttaggataacattcccgaaggctccaaaattcgacgcattatctccatacagctcgaagggcctcggtagcccgggcctatcaaatcaatctgggattggtctgaagtacgacgatgagttcgaaagagagccatgtcgatcagtagaggatcggaaggaatgtccgcgcccaagtcacatatcagtagtcaacgaataaaagaaggcattcaaagggcctcaaagggcatgagatgatacagaaacaaagtaaagatctaaagcaaacgtcactggagtatattccatttcataaaagatccatttacaacaaccctcaaggggacattacatacaattacaaaatcctacggaggatctctgcgcctaaaagaagagacaaagggatgcacacgccaagtgaaagcccgaaagactggtccacctttgaactccgcaacaggtgcctccggacgtgcatcctcgaaagtttcatcccaaccttccacactgatatccccaagggacaaggtgagtggcggggagggatgaaaaaatggcatagctctccgaaactcgaggaccctctttggccaagggaactctggagtgacatcggaccaaacaaaccttgatcccgcttgcacgactacttagaatccacttcttggaacgtctagccatgcaagcccccaactcggagcggagcaccacatcgagctagggtatgaaggtgagaaacggtgtttaatccgagcccccttttgagcagcggtgcataatccgaatgactgtctacacgaggggaaaattgaccccccttccatcatcatctcgggccaacaacaatagccacagtgaatatgttaacggccacagtagtagcgggacaacatggttatgctcaacgaagggaagcccctgcaaaaggccacgacacagtctaaggaaactcctccaaaaggacttaaggtcatgagcccctagcatgatgttcaagggtgaaagaagatgataagaagaaataggcaagcaagccaacggaggcactgtgataggaaaagcaaagccaaggcacccccatttatagggggttacaacacgctcatctaggctttggaagattgactgacgggcgcagtcaatgcatccatggaaaaccaaaccaacagtggtaccttcaccttgggaagtgagaattaggagtacaatgaatgaggtcagaaatcacgagctcgtggatgtccggttaccacaaagctcacgaccagagtcgcatcatcgatatggcatcgccgaaagaagctcgaggagtcgagtgtcaaaatcatttcccatcacttcataataggaaatgcggagacaatctatacacagcaaaattagaagactttatttctcactgttgagtcatttcggaagcatgcctcgggaccccgaggacgagaggccacaaccgagttcccaatatcagggctcgttgaagcctgacttagaggaaaaggagaccgaagtcagtacagagagggaagctcccaaggcacatagctaaatctgacagggccggcctatccagagcctatgttgaggcatcacgtcaagccatcccatttacatactttgtaattaatctccacatacttgtagctaagtcccccctcctatataaaggggactcaccctaccttgtaagggactgatgttgctctatttctccataagtgcgataatatctctctctctcttttctttctagcttgttcgtcctcactggcccgaggccactttaatatatatcgtcctcttacttattcttcagtatatagctcagtattggctgaaaagagccttgcttaatcgtatccttaattgttatcccattcccggctatccccgatagctcgagcccgactcaaacctcgaccccgaggtcctctccggccggtcctgcatccgggcaacagaccccttcggtttgattactgcctcattttagctcgcactttatcattaaacttcatgatattagcattgtttgctctaacaactagctcgagaatagatcacgtatttttagaatcccatttacaaatttaattggtattaccattttcacggtaaacatactcgtcactatgtctatacgtcgtactcaacaaatagaacatagcaaataggacacaactcctaatccctcaagctaaggttagaccaaacacttacctcgatgtcaattcgctcgtatctagccacaagttacttaactatatccataaatgctaaatgaatcaattccaatacatgaaaataggttttctaaagtttttcccaaaaagtcaaaaatcgcctccgagaccacatggtcaaaatacgaggttcgaaccaaaactcgattaaccaatcccccacgaacccaaatatacaatttgttttgaaatcggacctcaaatcgaggtccaaatccccaaaatttgaaaaacctaggttttaccaaaaatatccaatttcccccatgaaaacccttgattttgagttgaaatcatgagaaaagatgttaaagaataataaaacaagttataaatgacttacaatcgatttgcaagagtatttgtctttgaaaaatcgcccaagagagtttatgttttgaaagggtttgaaaaatggttgaaatgcgtctaagtaatgaatttgcaggtcgcagatgtcgcaattgcgacaagggttcgcaattgagaacccttaaggacttgctacactcgcatttgcgaccattgttcgcaattgcgaaatcgcatttgcgatggggaagtcgcatttgcgaccatcgggatttctaggcctcttcgcatttgcgaagaaatgatcgcatttgcgatcagccctgcccaggccttctctcgcatttgcgatgggttattcgcatttgcgatctcgnnnnnnnnnnnnnnnnnnnnnnnnnnnnnnnnnnnnnnnnnnnnnnnnnnnnnnnnnnnnnnnnnnnnnnnnnnnnnnnnnnnnnnnnnnnnnnnnnnnnnnnnnnnnnnnnnnnnnnnnnnnnnnnnnnnnnnnnnnnnnnnnnnnnnnnnnnnnnnnnnnnnnnnnnnnnnnnnnnnnnnnnnnnnnnnnnnnnnnnnnnnnnnnnnnnnnnnnnnnnnnnnnnnnnnnnnnnnnnnnnnnnnnnnnnnnnnnnnnnnnnnnnnnnnnnnnnnnnnnnnnnnnnnnnnnnnnnnnnnnnnnnnnnnnnnnnnnnnnnnnnnnnnnnnnnnnnnnnnnnnnnnnnnnnnnnnnnnnnnnnnnnnnnnnnnnnnnnnnnnnnnnnnnnnnnnnnnnnnnnnnnnnnnnnnnnnnnnnnnnnnnnnnnnnnnnnnnnnnnnnnnnnnnnnnncatttgcaagccaggcttcacaaatgcggagcctgcagacctgcaacatgctagctaaaaacctgcaacttctcaaatccaaatttcactatgtggcatatccgaaactcacccaagccctcgagactccaaaccaaacatgcacaccaacataaaaacattatacggacttgctcgtgcaatcaaatcatgaaaataacatgtaaaactatgaattaaacctcaaaactcatcattttcatcaagaacacttnnnnnnnnnnnnnnnnnnnnnnnnnnnnnnnnnnnnnnnnnnnnnnnnnnnnnnnnnnnnnnnnnnnnnnnnnnnnnnnnnnnnnnnnnnnnnnnnnnnnnnnnnnnnnnnnnnnnnnnnnnnnnnnnnnnnnnnnnnnnnnnnnnnnnnnnnnnnnnnnnnnnnnnnnnnnnnnnnnnnnnnnnnnnnnnnnnnnnnnnnnnnnnnnnnnnnnnnnnnnnnnnnnnnnnnnnnnnnnnnnnnnnnnnnnnnnnnnnnnnnnnnnnnnnnnnnnnnnnnnnnnnnnnnnnnnnnnnnnnnnnnnnnnnnnnnnnnnnnnnnnnnnnnnnnnnnnnnnnnnnnnnnnnnnnnnnnnnnnnnnnnnnnnnnnnnnnngctcttcaaccggaggtccaaatcacgtcaaataaactctattttttaccaaattttatagttaccatttaaatattttaacaagtttgtaccgggatctggaaccaaaatacgggcccaatgccaatgattttaaacattaattcttttctttatttcataaataattcagcaaaacaatttctttcaaaaattgatttctaaggcttgggaccccggaattcatttctagcatacgcccaagtctcatattttattgcggacctcctaggattgtcggcatatagatccgagtctgtttgctcaaaatgttgaccaaagtcaaccaaaatcaaattttaactctagaaatttttatttctcatattttcacataaaagctttccagatatacgtccggaccacgcacgcaaattgaggtaaggtaaaaaggaggttttaaggcctcagaatataggatttgtttctaaaataagtgatgaccttttgggtcatcacatcctccacctctaaaacaaacattcgtcctcgaacggacataagaaggaagtacctaagtcggggaaaagatggggataacagctccgcatattggactcggactcccaggtcgatgcctcagcaagctgacctctccactgaacacgaacaaaagggaaactcttcgatctcaactaacaaacctgccagtctagaatagctactagctccttctcataggagaagtctttgtccaactggacagtgctgaaatctaacacgtgtgatggatcaccgtgatactttcaaagcatggacacatgaaatactagattcacgattgataagctcggcagcaacgcaagtctgtaagccacctctcccactcgatcaagaatctcaaacgggctaatgaacctagggctaagcttgtccatctttctaactatcatcacgcccttcataggagacttccgaagcaacacccgctcacccaccatgaacgccaaatcacgaaccttatggtcggcataactctttttcctggactgagtattacgaagcctatactgaatgatcctaaccttgtccaaggcatcctgtaatagatgcgtacccaacaaccgagcctctctcggctcaaaccatccaaccggcgactgacaccacctaccatataaagcctcataaagagccatctagatactcgactggtagttgttgttgtaggcaaactccactagaggcaaaaactgatcgcacgagcctccaaagtcaatgacacaagctcggagcatatcctccaaaatctgaataatgcgctcggactacccgtctatttgaggatgaaatgttgttcttaactcaacccgtgttcccaactcccgctgaactgctctccagaaatgtgatgtaaactatgtacctctatccgaaatgatagacatgggcacaccatgaaaatgaacaatctctcgggtatagatctcagctaacctcttagaagaataggagactgccaccggaatgatatgtgctgacttggtcaacctatcaacaataacccacactacatcgaacatcctctaagtccgtgggagtccaacaacgatgtccatagtgatatgctcccacttccactcaggaatctcaatcttctggaacaaaccaccaggcctctgatgcttgtacttaaactattgacaattcaaacatcgggccatctatgcaacaatgtccttcttcattctcctccaccaataatgctgccgcaaatcctgaaacatcttagcggtacccgggtgaatagagtaccgggaactatgggccttctctaaaatcaactcctgaagcccatccacattaggcacacaaactcgaccctgtagcctcaaaactccataatctcctaatgtactttgcttggcacctccgtattgcaccgtgtctctaaggacacacaaatgaggatcatcatactgccgatctcggatacgcttcaaaaaagaagaatgagcgactgtgcaatctaacacacggtccaacctcatgaactgattggccaaagcctgaacatccaaagaaagtggtcactcaccgacctgaatatacgcaagactgcccatactagctgacttcctactcaaagcatcgggcaccacattggcctttcccagatggtataagatggtgatatcatagtccttcaatagcttaaaccaccttctctgcctcaagtttagctccttatgcttgaacaagtattgcaaactcttgtgattcgtgaacacctcacatgacatgccatatagataatgcctccaaatcttcaacgtgtgaataatggatgctaaatccaaatcatgaaccagatagttcttctcatgaatcttcaactgatgtgaagcatatgcaataaccttgacatcctacatcaacaccgcaccaagtccaatacgagatgcatcacaataaactgtttatgtccctgaacctgtgggcaaaaacaacactagcgtcgtagtcaaagctgtcttgaacttctgaaagctcgcctcacactcggccgaccacctaaattgggcacccttctgggtcaacctggtcatcagggctgcaatagacgaaaacccctccacgaactgatgataatagcctcccaaacccaagaaattctagatctttgtagttgatgctggtctaggccagttcttgactacctctatcttcttaggatctacctgaataccctttgctaatacaacatgacccaagaatgcaactgaacttaactagaactcacactttgaaaacttagcatacaactgactatctctcaaagtctggaggaccactctcagctgctcatgctcctcccgggtgggagaatagatcaaaatatcatcaatgaagactatcacaaatgaatccaactaaggactgaacactcggttcatcaaatccataaaagctgttggggcatttgtcaacccaaatggcatcaccaagaactcataatgcttgtgccaagtgcggaaagctgtattagggacgtcagatgccctaatcctcaactgatggtagccagatctcaagtcaatcttcgaaaataccttggcaccctgaagctgatcaaacaaannnnnnnnnnnnnnnnnnnnnnnnnnnnnnnnnnnnnnnnnnnnnnnnnnnnnnnnnnnnnnnnnnnnnnnnnnnnnnnnnnnnnnnnnnnnnnnnnnnnnnnnnnnnnnnnnnnnnnnnnnnnnnnnnnnnnnnnnnnnnnnnnnnnnnnnnnnnnnnnnnnnnnnnnnnnnnnnnnnnnnnnnnnnnnnnnnnnnnnnnnnnnnnnnnnnnnnnnnnnnnnnnnnnnnnnnnnnnnnnnnnnnnnnnnnnnnnnnnnnnnnnnnnnnnnnnnnnnnnnnnnnnnnnnnnnnnnnnnnnnnnnnnnnnnnnnnnnnnnnnnnnnnnnnnnnnnnnnnnnnnnnnnnnnnnnnnnnnnnnnnnnnnnnnnnnnnnnnnnnnnnnnnnnnnnnnnnnnnnnnnnnnnnnnnnnnnnnnnnnnnnnnnnnnnnnnnnnnnnnnnnnnnnnnnnnnnnnnnnnnnnnnnnnnnnnnnnnnnnnnnnnnnnnnnnnnnnnnnnnnnnnnnnnnnnnnnnnnnnnnnnnnnnnnnnnnnnnnnnnnnnnnnnnnnnnnnnnnnnnnnnnnnnnnnnnnnnnnnnnnnnnnnnnnnnnnnnnnnnnnnnnnnnnnnnnnnnnnnnnnnnnnnnnnnnnnnnnnnnnnnnnnnnnnnnnnnnnnnnnnnnnnnnnnnnnnnnnnnnnnnnnnnnnnnnnnnnnnnnnnnnnnnnnnnnnnnnnnnnnnnnnnnnnnnnnnnnnnnnnnnnnnnnnnnnnnnnnnnnnnnnnnnnnnnnnnnnnnnnnnnnnnnnnnnnnnnnnnnnnnnnnnnnnnnnnnnnnnnnnnnnnnnnnnnnnnnnnnnnnnnnnnnnnnnnnnnnnnnnnnnnnnnnnnnnnnnnnnnnnnnnnnnnnnnnnnnnnnnnnnnnnnnnnnnnnnnnnnnnnnnnnnnnnnnnnnnnnnnnnnnnnnnnnnnnnnnnnnnnnnnnnnnnnnnnnnnnnnnnnnnnnnnnnnnnnnnnnnnnnnnnnnnnnnnnnnnnnnnnnnnnnnnnnnnnnnnnnnnnnnnnnnnnnnnnnnnnnnnnnnnnnnnnnnnnnnnnnnnnnnnnnnnnnnnnnnnnnnnnnnnnnnnnnnnnnnnnnnnnnnnnnnnnnnnnnnnnnnnnnnnnnnnnnnnnnnnnnnnnnnnnnnnnnnnnnnnnnnnnnnnnnnnnnnnnnngaccttgttcaactgtcggtaatctatacacatcatcattgatccatccttctttttaacaaataacatcggcgcaccccaaggtgagacactaggtctaatgaagcctttttcgagcaagtcttgcaactgctccttcaactcattcaactcaggcagggccatacgatacggcgggatagaaatgggttgagtgcctagagccaaatcaatacagaagtcaatatccttgtcgggtggcatacccggcaggtctggaggatatacctcaggaaactcacgaacaataggcacaaaatcaatagaaggaacctcggcactagaatcatgaacatatgccaaataagccaaacacaccttctcaaccatacgtcgatccttcatatatgagataacactacgggtagaatgaccaggagtccctcttcactgtaaatgaggcaagcccgtcaaggctaaggttacagtcttggcatgatagcccaagatagcgtggtaaggggataacatgtccatccccaatatgacatcgttcagacgtaacaaatctacatgagtctcaagacccccaatcacaactatacacgaatgatgaacacgatctaccataatataatcacctaccagtgtagacacatatacaggagcacttaaagaatcactaggcatgaccagatatggtgcaaaataagagtacgtagatcttggatcaaatagaactaaagcatctctactacaaaccagaaccgtacctgtgataactgcatcggaagccttagcctcaggcctcactagaagagcataacatcggggctaggccttaccaccttgaactacatatctgggacagcctgctgctagctggcctccacctctagcggcttgacctccacctctaatacctctacatccacctctagcacctctacctccacctctagatggctgagcgagctgtggaacactcaatgcctgaaccatggcacgagaaccctgatgctgagagctactcaatgcttgagggcaaaatatagcaatgtgacccatatgaccataagtataacaagccctcggctgctgagactactgaccctgacgacctgaatgaccacctcgaaactctggagcggcgaggcactgataggagcttgcggtgcactatagtactgttgatccgaatactgcatatgagaatcacggccacctgaaaaactgtgagaaacctgaagtgttgactaaaaaggcctaggatgatggcatctaccgtacaaatccctgcctccagatgaggccccactaaatctgcctaaatgacgaggcctcttgtcagacccctgaccacctccctgtgatagaactatctcaactctcctgtccacattggccgcctcctaaaaagaaatctcactctccgtctccttagacatctaaagtcgaataggttgaatgagtccctcaatgaacctcatcactctctctctcttagtgggaagtataagtaaagcatgatgggccaaatcaataaacctggtctcgtactgagtaacagtcataaaaccctgctagagatgctcaaactgcctctgatggatctctctctgagtgatagggagaaacttctccagaaatagctgagaaaactgctcccaagtcaaagctggtgacccgtctggtctagccaaacaataatctctccaccaagtcttggcggatctagacaagcgaaaagtagcaaagtcgaccccattggtctccactatcnnnnnnnnnnnnnnnnnnnnnnnnnnnnnnnnnnnnnnnnnnnnnnnnnnnnnnnnnnnnnnnnnnnnnnnnnnnnnnnnnnnnnnnnnnnnnnnnnnnnnnnnnnnnnnnnnnnnnnnnnnnnnnnnnnnnnnnnnnnnnnnnnnnnnnnnnnnnnnnnnnnnnnnnnnnnnnnnnnnnnnnnnnnnnnnnnnnnnnnnnnnnnnnnnnnnnnnnnnnnnnnnnnnnnnnnnnnnnnnnnnnnnnnnnnnnnnnnnnnnnnnnnnnnnnnnnnnnnnnnnnnnnnnnnnnnnnnnnnnnnnnnnnnnnnnnnnnnnnnnnnnnnnnnnnnnnnnnnnnnnnnnnnnnnnnnnnnnnnnnnnnnnnnnnnnnnnnnnnnnnnnnnnnnnnnnnnnnnnnnnnnnnnnnnnnnnnnnnnnnnnnnnnnnnnnnnnnnnnnnnnnnnnnnnnnnnnnnnnnnnnnnnnnnnnnnnnnnnnnnnnnnnnnnnnnnnnnnnnnnnnnnnnnnnnnnnnnnnnnnnnnnnnnnnnnnnnnnnnnnnnnnnnnnnnnnnnnnnnnnnnnnnnnnnnnnnnnnnnnnnnnnnnnnnnnnnnnnnnnnnnnnnnnnnnnnnnnnnnnnnnnnnnnnnnnnnnnnnnnnnnnnnnnnnnnnnnnnnnnnnnnnnnnnnnnnnnnnnnnnnnnnnnnnnnnnnnnnnnnnnnnnnnnnnnnnnnnnnnnnnnnnnnnnnnnnnnnnnnnnnnnnnnnnnnnnnnnnnnnnnnnnnnnnnnnnnnnnnnnnnnnnnnnnnnnnnnnnnnnnnnnnnnnnnnnnnnnnnnnnnnnnnnnnnnnnnnnnnnnnnnnnnnnnnnnnnnnnnnnnnnnnnnnnnnnnnnnnnnnnnnnnnnnnnnnnnnnnnnnnnnnnnnnnnnnnnnnnnnnnnnnnnnnnnnnnnnnnnnnnnnnnnnnnnnnnnnnnnnnnnnnnnnnnnnnnnnnnnnnnnnnnnnnnnnnnnnnnnnnnnnnnnnnnnnnnnnnnnnnnnnnnnnnnnnnnnnnnnnnnnnnnnnnnnnnnnnnnnnnnnnnnnnnnnnnnnnnnnnnnnnnnnnnnnnnnnnnnnnnnnnnnnnnnnnnnnnnnnnnnnnnnnnnnnncttgagaacctcatgacagctatctaaataatccaggggatcctcagaagatgcactgctgaaaatggtagtaaagagcttggtgaacctgtccaatttccacaatgcatcggcagacatagctgctccatcaccagtctgagctaccatgcccggctgaacttctccaactggctgagctgttggagtctgaaactagggagccatctactccggagtgcgagtagcaggattctgggctcctcctctagctcgagagatggctggtgctacaggaagcaagcctctccataaggcccaccagacggactagagcatcctagagcactggtgtagtaatgaacccatctgggacctgatctgggcccaccggaactacctaggccggaacctcatcatcaaactcaacctgaggctccgccgctggtgctactactttgggctaagctctgcccctactacggcgtctagcacggcctcggacttgccctacgaacctcgtgggagctgctgctaggggctcggttgctgatcagtggatgaggaagcgcgtgttctcgccatctacaaaagaacagagtagaaattcaattagcattgagaaaccaaagcgtgcaacaggaaattgtgaagtttttcctaactctgtagctgctgggatacatacagacgtctccgtaccgatccctcagactctactaagcttgtccgtgagttgtgagacatatgtaacctagagctctgataccaacttgtcatgacccggatttcccaccctcgggagtcgcgatagagcctactgctgaaagctaggcaagccaaccattgagcaatttacctttttcccatttttaatcctttaataatgatgaaccaacagtttataaacaacggaatttaaacaagcggaagaaaaacaaataaaactatttaaatatttccaatacaatttcttaaacaaggactacccaaaactggtgtcacaacttcacaaacggtctaggaatactacaaacaaggtctgaaaaataaatacaaaattgtttctgaaatacgtaaatgaaacaggacgaaaggatagatggagatgtcagggcctgcggacgcccacaggactaccttggatctccgtatggactgaaggcagcaaccccaaagctaaggtccaaaagctactgcgtcgggatctgcatataatgcagagtgtagtatcagcacaaccgaccccatgtgctggtaagtgcctatcctaacctcggcgaagtagtgatgaggctaggaccagactaccaaataaacctgtgcagttaaatcatatacagtggaaaataacagcaggagtgtacagttaagaatgggaggggggaacatgttgcggggaaatatgaaatgatactagaaggatagcaagtaattacaaggaacaccataactcaattatcaacaagaatcagaaatcaaacaagtgcacggcatcaccctttgtgcttttactctcgtcctaaccataagagtcaatataatctgcacggcatcatccttcatgcttttactctcgtactcaccataaaatcaatataattggcacaaaattgtacatcgtacagcacgacatcacccttcgtgattttacactcttcctcacaataatcaaacacggcatcacccttcgtgctttaacactctctcaccaaaacaatgcacaacatcacccttcgtgttttaacactcttcctcacccaatcaaaaatcacaagaaataaggacaaggaaataaatgaaatcataataaaatcccggcaagggaacaatagtacaacaataatatccaggaagggaacaatatcaagaatatcaacatcacggcaagggagatagaattaaaagcaacaacattccggcaagggagatagcattaaaagcaacaacatcccggcaagggagacaaataataatcctcttctttttttcacgtttacttcacaactcactataaaacttgagccaatgctctataaggttcaatttctaattttacttccacaattcgtttgcgatgggttattcgcatttgcaatctcgcatttgcgagccaagtttcgcgaatgcaaagcctgcagacctgcaacataccagctaaaacctccaacttcccaagtccaaatgtcactctgtggcctatccgaaactcacccgagccctcggggctccaaaccaaacatgcacaccaacctaaaaatatcatacgggcttactcgtgtaatcaaatcatgaaaataacatgtaaaactatgaattaaacctcaaaactcatcattttcatcaaaaacacttaaagttcataactcttcaatcggaggtccaaatcacgtcaaataaactccatttttcatcaaatttcacagttaccatttaaatactttaacgagtttgtaccggactccagaaccaaaaaacaggcccgatactattgattttaaacattaattctttttttatttcataaataactcagcaaaataatttctttcaaaaattaatttctaaggcttgggacctcggggttcatttccgggcatatgcccaagtatcatattttactgcagaccttccgggatcgtcggaacacagatccgggtccgtttgctcaaaatattgaccaaagtcaaccataattaaattttaactctagaaatttctatttctcatattttcccataaaagctttctggatatacgtccagaccacgcacgcaaatttaggtgaagtagaaaagaagattttaaggccttggaatacaggatttatttctaaaataagtgatgacctttcggatcatcacaatttcgatccaaaaagaaattgtgtaattatttatgataacttggtgaaaaacaaaataaactcagtcgaagtatacatgattttaaataaaaagaaaagtgtatgtattttgtacaagaaatagtgactcactaataacaatgcataattaaatactctacggcaaaaatttatactaataagcactttgaactttgaaacagtagcaagtttcgagacgtttttcaactcaccatttttcatgaaaattgattcatttgagattattatgtataattgtccttctacagaataatctgacaaaaaaatataactccaatccttgattaaattagtaacttattcaagtattttattttctaaaaaaaatctgtaaataagttaagtggagttatgctcacaaagaaaaatatttaattttccattatttattgataaataattgaaggagctaggaaagcacaatagtagggatttctttcttacgagaaggggtgatgaagagaagccattttcacagccatcttcacacagaaaagagaaggacgaagaagaaatatttcagacagacacttagcttttcggacttctctatattgtgttgaagtgcccaagtgttttatcaattgtagctcagccttacccgtggaagaattatggagggtcatgatcttttattctcaaccatctgatcaatatttaaatagttgtacttaaggaagcttccaagaagccaaactcatgtgtttctcgcttgagcacatgggaaagaatattttttagttttctgttacatagtagacaaataagagtagtacaagtgtataggaatattctttattttttattttactgtaggataaatctatataattagggatttacattatcaatacaaggcagagaaatttcacaattctttcctattttctttcatggtatcagagcagtagtagatcgatccaaatttccttttttctcagaatatagtattcaactatggcaggagaagaagttcctccgactctttttactcccattatctctggttcaaccattcacaggatgtgaatcatccttatttcctttactcgtctaattctcctggtttgagtcttgttaccacactatttgatgatagaggctttgagggacggaggagattaatttttgtagcactttaatccaaaaacaagataggcttcataaatggtgtgtgggaaaccaaaacctgatgtacgagatcaccttcaatggagcagatgcaacttcatggtgacatcttggcttctgaactctttatccaaagagataggtggcagtatcatctattcataatctacaaaagatttgtggaatatccttgaacacagatttgggcaaactaatagagccaagctgtaccaactgcaaaagaaaatatcagtgttagttcaaggtaacaacagtattattggatactttaccatacttaagaaattatgggatgaacttgactccctcaactctcatctagtctactctagtaactgagtttgtgatggaaaaagaaaagtcacaaagtttttagaagaccaaaggatcattcagtttttaatgggactaaatgatgtctattcccaggcaagaggaaacatccttatgatgaatccattgtctagaatagatttttcttattcacttcttctacaagataaaaatcaaagggagatatatgcaagatcacagttcaatgctgatgcttcctcattcatggtaggagttcaaggtaaggctccacagaaaaacaacaatcagtcacaacaaaagtcatggactaattcacaaaaggttaataacacacagcagaaacctaagggaaggaaagcaaaatttaatcctaatatgaactatacatattgcatgagaattgggcatgtcagggtagattgttataggctaaatgggtttccagatgatttccaattcaccatatcaacacaggtcaaggctaatgctatagttaaaggacaagacaatgacaatggaagcactcaaagcaatgatggaacaccttaaactcagtttttcagtaaggaacatatgtctgagctgatgaacctaatcaagcaggcacaacttggaaatatagcaacattaggaactacaatcaatgcaaatgcagtggctgatacaatacttaaatatactaaaacttggttggcagctattaacacaaaaacctggatcattgatttaggggcttctgaacacatgtgttttgattcaaattgtttcttaactttagatccacttcctattcctgtatatattagcctacctaacttatttcaattatatgtcaaacacataggtagtgttcctattcagtctaatatgattcttgaaagggttctttatgttccttctttcaaatataatttactcccagtccataagttgtgtgtccagttttattgctcactcaatctaatttctagtggatgcatcatgcaggtccctttaatgaagagggacaagtttttgatgaattaagaggagaattgtacctgctggaacctagtacacctaaaatagattctggttttagtttaaataccaatatattttcaattccacaaggaagtgattccattctagttcctagtgaagtttcttgttctgtttctaattccaatatagaggtctccaatgtactccaatggcatttttagattggggcatctgccatttttagtaatgaaaaatcttcaattcatttattttccttccaatttcaattttgtgtgtgatatttgtccaaaagctagacaaactagattaccttttcccttgagtcaaatcagaactcatggaattttttatcttattcgtattgatgtatgaggaccattcaaaagtactacttacaatggatataaatatctcttgaatgtggttgataattttagtaggggaacttggactttccttttaagttccaaaagtaatgatttcactatcttacaatctttcttagttatggtagagagacaatttgcaaggaaagttaaaagaattagatctgataatgcaataaaatggggaagggatcttttcagtctgattttctttagtctcaaggcatcttacatgagacttcatgtgtagcaagtccccagcagaatatggtagttaaaagaaagcataggcaccttttggaagttgcaagaggattttattttcagtcacatgttcctatccaatactagggagagtgtattttgactgttacatatctaatcaataggtttccttctagagttctaaaaggaaaaacaccttttgagattttgtttaaaaggagtccacagaatgaacaactcaagtcctttggatgcttatcttgtgcctctactctaacacaaaacagaagcaaatttgatcccatggcacacgcttttatttttctgggatatgcacaacatcagaaaggatataaattgctagagttacattctaagaaggtctttacctcaagagatgttaagttccatgaagcaatttttcttttgtttctgctgctccaacctcattctctcctttcccccttatcttttcttccctcacccatctaccactactgaaactacttctcaagatttcctatctcccaactcaaccatcaatcattagtcacactcacatgtccctctatatccaaatacttctgagaatagcacccttatttctctcaataatcctggaaatcctgtatctattaccagctccccagattctccttttcataatccatctcatactgattactctatttcacagcctacaatcccaataccaccacctcctcttagaaaatctgagaggatttcccagaaacctacctatctcaataaatatgtctgcaatagcattgttttctctaatcttacctcctcctgtttttatcatatttctcaccctaattgtcacgaccctaaatgctcggtcgtgatggtgcctatcacaatactaggcaatccaacccaaaccatcaaccacaataatttcttttataaaaaccatttcctaacattgatttaaatctcaaattctcataagaaatgtataaaacagctaaaatgtgtggaatttagtaaaacattaaaccaacatagcctaaacatctggagtcacaagtctagagcctctaaatatataaatccgactatctaatacataacaagtctaaaatacagaaaaacaaggataggaaggaagaaagcagggctgcggattccatgcatctaccttgcagtctctggcaaactctgacaatgctgaggaccctcactctgccgctcgggcacctagatctgcacacaaggtgcagggagtaacgtcagtacgccaactcaataagtaactaaagtaaataaggtctgaaagcagtgacgagcagttataaaatcatatagaagagtaaacaacagaataacaaatcaaactcaacggttttagaccagtttcttcataaaacttcagtttcaattgaaatactttgaaatcatttaaaaaatttcagcagggcttattttaaaagaagagtgaaatcagcaaaagtatcataaatgggcccctcgggcaaagtatcactcaaaaatatagcctctcgggcaaacctcttggtcacccatgactcagctctcatcactcagtactcacactcagcactcaggctcaaatacacctcataatagtaataatcataataattgctgcgacgtgcagcccgatccatagtttatagacgactatgcttactgggggtgtacagactctggaggaactcctacagcccaagcgtcatatcgctgcggcgcgcagcccgatccaacatatatatattgttgcagcatgcagcccgatccataatatatacatataatattgttgcggtgtgtagcccgatccgtaatatttataatcctcaccattaggtcctcaacctctgtcagtcattaacctcacaaccactcgggcataacagtagaaatcagggaaactcagttcgaagagttctcacattttaagaagtagaatgataaaaccagttttaaataataaacaggtaaaacatgactgaggatatgctttcaaataaatagagtgaggaaaacagtaaaaatgcccctaagggtttcaacaggtcggcacaaggcccaaacatggcatacaacccataatacaatataaatgtctaaaatatgagattttataagatttcaaatcaagtacgcagcttaatagtcgctacggggcagaccaagtcacaatctctaccagtgcatgcccacacgctcgtcacctagcatgtgtgtcacctcatttatcaaaacatttcgaaataccggggtttgtaccctcagttccagatttacaatggttacttacctctaaccggatgaattactactccacaatgcctttgcctctcgcctcggcctcaactcgcactgaatctacccaaaatcagaatcataacattagaatatgctaagggattgaagcccaagcgagaataatcaaattataccaaaaattctgaaattgaccaaaacccgacccccgggcccacgtctcaaaatatgataaaatttgcatcaacagaatccttatcactccatgagttcatacatatcaaaagtcccaaaatccagtcacaaatgacccctcaaatcctcactcaaaggtcttcaataccaagccctaatacctcaattttcttccttaatttccactaacaccatgattaaacaatggaaaaatgatcataaactcaagtaatgaagcttagggaacttaccaaactgatattcctcaattttcccttgaaatccactgccttagcccatttcccgtcttcaaaaatggagaacttagcaaaacttcacgaaggaaacattatatactttctgacctaggggttctgcacctgcggtccatccaccgcatctgcggtactgcttttgtggtccaagacatcgcacctatagttttccacttaaatgtccaaagtcgcatctgcgatcaaataacaacacatgcgccatcgccggtgcgctcaacataccgcatatgcagctcccacccctcgcatccttgaacgcatctacggcatcgcacctgcggtccccaatccacaggtgcggaaacaacagaagcagaaaaattctgcaacttcaccaaaaaatcaaactcttcgtcaaccctccgaaatcaccctgaggcccccgggacctcaaccaaaagcaccaacaagccatataccaccactcaaacttgtaacaatcttcaaaacacctcaaacaacatcgaatcagccaaatcacattgaaatcaagcctaagattctaaaatatttcgagttttgcttttgatccaaaaatctatcaaaccacgtccgaatgacctaaacttttgcacatacatcccaaatgacacaacggacctactacaactctcagaattccattctgacccctacatcaaaatttcacctatcaaccggaaaacgccaaagtttcaatttcgcaaattcaagcctaaatctattccggacctccaaaacatattccgatcacactcctaagtctcaaatcaccccctcgaagctatccgaactatcagaattcatatacgagccctatttcacatacgtcaacattcagttgacttttccaacttaaactcactcaaaagagactaagtgcctcaaacctcgccaaaatttttttgaacccgagccaaccagcccgataatacatgagacgactagtcgggtcatcacactaatattttttcttttggagacctttctctcaacaatcagactattttcaaatctatctccacagtttttgagcctaccagctatacacaagcttcccaagatcttggatggagaaaaataatggaagctaaaattcaagctcttcaactcaacaacacctggaatgttgtttctttacccccaggcaagaaagaattgccttgtaaatgggtttacaaggttaagcacgaatcagatgggtcaattaaaaggttgaaagccaggttggttgtcggggggacatacaaagggaaggcattgattattctgagacttttagtccagtggtcgagatgaccactatcagatgcttattgactgtagctgtgaataaagggtgggaagactcacaactggatattaacaatgcatttctacatggagatctataggaagaggtgtatatgaaatttccagcttgtctcactccctctcatcctaatcaggtgtgtttattgaagaaatcactctatggactaaaacatgcctcaaggcaatggtatgctcgtttagcaggtccctagcagagtcgctagagctgtcacacctcctttttaccacccccaaaagggatataagggagattttttaaatttaaataacaatcgaaacggtattatttatttaagatcagagtcgccacttgggataattaatggtgtcccaagtcaccggtttagaattctgaatcgaggaaattgactctgttttatagtccgcaaacacaaaaatccgggtatagaattctgttctcctgggagaaggtgttaggcatttcccaattccgtggttctagcacggtcgctcaactattattattggcctatttatctgatcttttacacgttttaaaacctactgtgcatttttaactttttagcccttttaatattttaggaaatttcaaggttatttaaaacgcatcgtaatccctgctatatgaaatgcaattgtggttcacgacacgttctatttaaccttattggaaaggagaatcaggtcacatgaaatgtacacccggatttataacatatttattccattattattatcaaaattatggcagggtcacatgaaatgcacactcgagcccttttaatctagttggcgtagttcagttgatggatagcgactcaattctatactatgacaaaatcatgtttagatataaccaattcgagtaaacacgagcagataaccgagcaagaaaattcagaaccacaaaaaataattacggaaacaacggaatcgcatcaccaaccaaattattaacattaagcttgattaaaacgaatagagtataaaagaattggacctcaatatagccggggaattgtttgtttcaatgtttaacgctcaaaaatgtgacgaaccatggacaaaacccgaattagcaacaaaaactcaactaaacacggattcaaacccatgctttaatcattgttcacgccagaatcaagcaaccaaaataatagtctttcagccttttcagttctcacgttttgaaattagagttcatttcaatctcaaataccccataacacttacgaaatcttctgaaaaaacataaatggatagtgtttcgtttgttgataaataacagtaactatacgaccaaagttttaaaaaaacaaaacgggtggagctgttttggtacttgaagatgactggtttgagctactattttcgtatatttggagctggttctatggctagttgcaacgggggttggaggagaatctaaatctattttggtggctgaaaatgccactacctctgtcgaacaccgaaattctgcgactgtaacaatgctttttaagaagaggaagatgaggcgctgtagctttttttgtatgaagaagcctggccgctgctagctattagggatccaccatttttgggttcaagatggaggggtgtgggctattcatgctttagcacttaagaagatgaaaggcaaagtcgtttggggttgaacggtgctggtctttggcttggtgttgctgatggtgtatgttgatggatctagcggctggggtggaagggtttgaagaagaaacgtgggggggctcgtgggtgtcagcggcggatctgatgtgatttttgggatctaggtttttgttcctcatttcagattttccttaggtccttttttcatttttctgttgtcttttttggctcttagggtcctaggctctatatataaaatctcatcactttaggtcttttagggttatattaggttagggggtatgggcttgaaaattatgggctaggtccgaaaattaggcctaaaatgggtcgttatcccaaattttattctttccgcaaacgagactaaaaacacgatctcatttactaattgatcctacttaagtaaaaataactattaaaataagactaacaattaaaacaaacttattttttggtgttttcaaatatcatattaaaataataataaggtactatttttgtatttttcttaatttttacgaaaggtatataaactaaaagcaactaaaaacaagaaatattttttgtaatttttattttgtgataaaaataaagtaaaagggtcaaaactagttaaaataactatattagacctaaactaaatatttaaatacaaaaatgtgtaaaatcttggggagggtnnnnnnnnnnnnnnnnnnnnnnnnnnnnnnnnnnnnnnnnnnnnnnnnnnnnnnnnnnnnnnnnnnnnnnnnnnnnnnnnnnnnnnnnnnnnnnnnnnnnnnnnnnnnnnnnnnnnnnnnnnnnnnnnnnnnnnnnnnnnnnnnnnnnnnnnnnnnnnnnnnnnnnnnnnnnnnnnnnnnnnnnnnnnnnnnnnnnnnnnnnnnnnnnnnnnnnnnnnnnnnnnnnnnnnnnnnnnnnnnnnnnnnnnnnnnnnnnnnnnnnnnnnnnnnnnnnnnnnnnnnnnnnnnnnnnnnnnnnnnnnnnnnnnnnnnnnnnnnnnnnnnnnnnnnnnnnnnnnnnnnnnnnnnnnnnnnnnnnnnnnnnnnnnnnnnnnnnnnnnnnnnnnnnnnnnnnnnnnnnnnnnnnnnnnnnnnnnnnnnnnnnnnnnnnnnnnnnnnnnnnnnnnnnnnnnnnnnnnnnnnnnnnnnnnnnnnnnnnnnnnnnnnnnnnnnnnnnnnnnnnnnnnnnnnnnnnnnnnnnnnnnnnnnnnnnnnnnnnnnnnnnnnnnnnnnnnnnnnnnnnnnnnnnnnnnnnnnnnnnnnnnnnnnnnnnnnnnnnnnnnnnnnnnnnnnnnnnnnnnnnnnnnnnnnnnnnnnnnnnnnnnnnnnnnnnnnnnnnnnnnnnnnnnnnnnnnnnnnnnnnnnnnnnnnnnnnnnnnnnnnnnnnnnnnnnnnnnnnnnnnnnnnnnnnnnnnnnnnnnnnnnnnnnnnnnnnnnnnnnnnnnnnnnnnnnnnnnnnnnnnnnnnnnnnnnnnnnnnnnnnnnnnnnnnnnnnnnnnnnnnnnnnnnnnnnnnnnnnnnnnnnnnnnnnnnnnnnnnnnnnnnnnnnnnnnnnnnnnnnnnnnnnnnnnnnnnnnnnnnnnnnnnnnnnnnnnnnnnnnnnnnnnnnnnnnnnnnnnnnnnnnnnnnnnnnnnnnnnnnnnnnnnnnnnnnnnnnnnnnnnnnnnnnnnnnnnnnnnnnnnnnnnnnnnnnnnnnnnnnnnnnnnnnnnnnnnnnnnnnnnnnnnnnnnnnnnnnnnnnnnnnnnnnnnnnnnnnnnnnnnnnnnnnncagctattctatttccctgaatgactattccttattctacaaacacacaaataagaggatatccatcatagtagtatatgttgacaatattctcatcacaggaaatgatgccacataaatacaacttatgactcaatttttgaattctgaattcaaagtcaagaacttgggacatacatactatttcttaggcatggaaatactcagagaacaacaagggtacatagtcagtcaacaaaaatttaccttggaactattggttgagtttgattgtaaagggcctaccgtctcatctcttcttgatccatactccaaattgcacgctgaattagaaccaccaatggaggatcccactctttatcgatgatcggtaggtgaacttaactatctcaccaatactcggccagatatttgttttcttttctttgccttagtcaatttatgcaaaggccttctctttcacatttttctactggtctcagagtgttctgatatctttgatcagacccaggccaaggtatccttctctcttctgctccctcttttgatcttgtcgctttttgtgatgctgactgggctgcttgtaaagattctcgtcactccgtcagtggtttttttattactcttggaggtgcccctatttcttggaaatcgaagaagcaaatctccatctccttgtcatccgctgaatttgagtatcgatccatgagatgggtgactgctaagatcacttggcttgttcgactccttgctgatttatctactcctccaactttgccggttcctttacactctgacagtctggcggcgattcatatcgcccgcaatcccatcttccacgaacgaactaaacatgtagagttggattgccatttcgttcgatagcaatttctcgctggattgatatccctttcattcgttccttaaaaatcccaaattgcagatctctttaccaaacccttatctagggtttctcacaccaacatcatgagcaagctggggtttttgtctctaccctccagcttgaggggggatgatgaagagaagccattttcacaaccatcttcacacagaaaagagaaggaagaagaagaaacatctcagacaaacacttagcttttcagacttctctatattgtgttgaagtgcctaagtcttttatcaattatagctcatccctacacgtggaagaatcatggagcgtactcataatcttttattctcaaccatctgattaatatttaaacagttgtacataagcttccaagaagtcaaactcatgtgcttctcgcatgagcatatgggaaagaatattttttagttttctgttgcacaacagacaaataggagtagtgcaagtgtataggaatattctttatttgttattttacaataggataaatctgtatatatatatgatgactcggccagtcgtctcatgcgttaccgctccatttccaccatttatgcttctttatgctttgtgtatctgtgttatgtggtatcaggttggttgaatcgaatccgaaatgattttggaaaggtttgagacacttagtctcttttgaggaagcttaagttggaaaagttaaccggatgttgacttatatgttagagggcttgtatgtgaatttcgatggtttagatagcttcgggaggtgatttgggacttaggaacgtgatcggaatgcgttttggaggtttggagtagatttaggcttgattggcgaagttgatattttggtgatttccggttagtaggcgagattttgatataggggtcggaatggaattccgagagttgcactatttttgttgtgtcatttgggatgtgtgtgaaaaatttcagttcatttgtacgtgttttggttgggttttttatcaaaagcgaaattcggaagattttagaaacttaggcttgaatccgatgtgtttttgttgatttgatgtgttttgaggtgttttgaagattggtacaattttgaataaggttttgtgatatgtttgtgcctttgattgaggtcccgggggcctcaggtgagtttcggatggtcaatcggaccatttcttgccttggagaggttgcagattttggttaagttgttgtagagcttttactcttcgcgatcgcgtagggagtctcgcgatcgcgtagagctattgtggggacagtacagtttactcagtgccttcgcgaagatggggatgtgatcgcatagggtaaaggcattgttgatcgcgaacgcggggagtgggtcgtgttcgcgtagagttaagtggaccaggggtcttgtcttgaagttgttcattgcgaatacggtagccagtccgcgatcgcatagtgttgggagcttgatcatcgcgttcgcatgggatattacgcattcgcatagggttaaatccgggagctgaggatttgtgcttcgcgatcgcgaaggatgtcctgcgatcgcgatgaaggaaattaggcctgggcagaaggtttaaaaggtcgtcttatccgtgaatgtggggtttatttcttccattgttggtcatttttggagctttttgaaggggattgaagagggattcaaggagaatcacttggaggtaagattcttggacttaaaactcgattctaatgtgaannnnnnnnnnnnnnnnnnnnnnnnnnnnnnnnnnnnnnnnnnnnnnnnnnnnnnnnnnnnnnnnnnnnnnnnnnnnnnnnnnnnnnnnnnnnnnnnnnnnnnnnnnnnnnnnnnnnnnnnnnnnnnnnnnnnnnnnnnnnnnnnnnnnnnnnnnnnnnnnnnnnnnnnnnnnnnnnnnnnnnnnnnnnnnnnnnnnnnnnnnnnnnnnnnnnnnnnnnnnnnnnnnnnnnnnnnnnnnnnnnnnnnnnnnnnnnnnnnnnnnnnnnnnnnnnnnnnnnnnnnnnnnnnnnnnnnnnnnnnnnnnnnnnnnnnnnnnnnnnnnnnnnnnnnnnnnnnnnnnnnnnnnnnnnnnnnnnnnnnnnnnnnnnnnnnnnnnnnnnnnnnnnnnnnnnnnnnnnnnnnnnnnnnnnnnnnnnnnnnnnnnnnnnnnnnnnnnnnnnnnnnnnnnnnnnnnnnnnnnnnnnnnnnnnnnnnnnnnnnnnnnnnnnnnnnnnnnnnnnnnnnnnnnnnnnnnnnnnnnnnnnnnnnnnnnnnnnnnnnnnnnnnnnnnnnnnnnnnnnnnnnnnnnnnnnnnnnnnnnnnnnnnnnnnnnnnnnnnnnnnnnnnnnnnnnnnnnnnnnnnnnnnnnnnnnnnnnnnnnnnnnnnnnnnnnnnnnnnnnnnnnnnnnnnnnnnnnnnnnnnnnnnnnnnnnnnnnnnnnnnnnnnnnnnnnnnnnnnnnnnnnnnnnnnnnnnnnnnnnnnnnnnnnnnnnnnnnnnnnnnnnnnnnnnnnnnnnnnnnnnnnnnnnnnnnnnnnnnnnnnnnnnnnnnnnnnnnnnnnnnnnnnnnnnnnnnnnnnnnnnnnnnnnnnnnnnnnnnnnnnnnnnnnnnnnnnnnnnnnnnnnnnnnnnnnnnnnnnnnnnnnnnnnnnnnnnnnnnnnnnnnnnnnnnnnnnnnnnnnnnnnnnnnnnnnnnnnnnnnnnnnnnnnnnnnnnnnnnnnnnnnnnnnnnnnnnnnnnnnnnnnnnnnnnnnnnnnnnnnnnnnnnnnnnnnnnnnnnnnnnnnnnnnnnnnnnnnnnnnnnnnnnnnnnnnnnnnnnnnnnnnnnnnnnnnnnnnnnnnnnnnnnnnnnnnnnnnnnnnnnnnnnnnnnnnnnnnnnnnnnnnnnnnnnnnnnnnnnnnnnnnnnnnnnatagtaaatcatggaaattaagccaaaaataaagaactagggcttcactatttagacctttgattgaggatttgaaagaccatttgaggttggatttcagaacttttgatatgtatgaactcgtggggagataagaaatctattgatataaaaattattgaattccaagacgtgggcccgggggttgggttttggtaattacgggatttatgttgtaaattaattatattcgcttgggcttcattcctttagcatattttgacatcctcgttctgattttggagagttccgacgcgattagaggccgattcgaggggaaaaggcatcacgagctagagatttgaccggttcgaggtgagtaatgattgtaaatgatgttctgagggtttgaaaccccggatttgcacatcgtggttctatattgaggtgagacacacgtttgatgatgagcgtgaggtcgagcactaatggggattgtgacttggtccatcccgactgatgattttaccgcgtatttgactgaaatctatttgatatcataattatttgggctgaatgccaactatttgaacccttcagggatttttattgatatttcctcactgttttaactttatacttgaactcaatcatgttattttccattgttttcatactcagccatgttttactcagttttaatacttaaatgatactttaaatgatgtttgggctgagaaacactattttactattgcgcgagtggcttgtcaggatttttgactgagtaaggccgagggcctatgttttgaggaaacatttgatactgattatgaggcctagggcctgaggtatgtacgccgcgaggtggcttgattgatataaggccgaggatgtagtgatgatgccacgaggtggcttgatattgcgcttgggccgtaaggggcccctccaagagtctatacatccccagtgagaacgagtacccattgtgatacgagattgagcctgaggggctggtattgttctaagataatgcccgaggggcaggtactattctgagatgttgcccgaggggcggatttgttgatattgtgcctggggggcaaacctttatgtgtttatttttcataattgactgtcaattacctacttaattgttgaaaaaggcttttaaggaagtaaatttgagttaaaggattttcacctatctttcactggtttactgttttaaaaagtgttttcactgcttcattatagcatgcttttgtgccttgcatgatttcctgctttcagtctttatttatgattattactcactgagttggagtactcactttactccttgcaccctgtgtgcagaaacaagcgtatctggtcctgctccttagtgttgaccgttccggctcaggcggatctaaggagtctctaggtagctattggcgttcgcagcccggagctcttccctattttacttcttcattttcttagtttctatattaaactctgtagtttgatttgtagtattccgaattgtttagatgctcatgactactaacactccggtatcagtatgctattaattgttgtgtttgggctgtattccgcatattattctattaattgcttaaactttggtttatttcttcatgtttagatggtatcttaaatgcttaattattaataatcggataatgggaagtgtcggctggccttgtcttcatgagaggtgccatcacgactgggttcgggtttggagtcgtgacaagttggtatcagagcctaggttatataggtctcacgagttataagcaggtttagtagagtctcgtgtatcggtacggagatgtctgtatttatccttgagaggctgcagaacctttaggaaaaacttcacattcttgaattcttctcgtgcgtccttgattcagcttgaaaagtaactctttgaattctttccacacgttcgtatgtgcgcatgagcgctcggtatcagatgtgcattgatggcttgtgattcctcaatctaggggtgagatgtgatctctgtgcattgatgttgggccagtttggaggactcgaggccggatttttgcctatagcttgagccctgagctgttgatttcatgagcgcagtttctggatccatatgttctgttatgtccctattaagggaggtgatgactggatagttacgtgatgaatgtgatgtgactgcgagatgtattcatgtgatttggaagcaacgagaagggtttgctggaggatagaaggactattaggtgctcgatttttatcttgatttgaggtatagccccgagttatgggtgtgtgaagaatctttctatgtttcctagttgggagtggagtaaatttcatgttgtggtctgagttcagactcaagaagtttaagtaactgcgtaatgtttatgatggtggaaggtatacagaaatgtttgtttgaggcaaagcaggtagggttatctcctgcggattattctgaagtttgtgtaatcccttgtgtcatttgttaccagggaaatatatgttttacaatttgaatttgggttgctcaagagagtaggctttactactacgagagtgaatgcgagatttgcagaagatataaactacaagatggtctgtgttccacgagcttataaaggattgagtttaatctcaatatggtattatggcaccaataaagtatatgcgttatgagttattgtatatgttttggtctatggcttcgagccaagtgggggagtccactattaattagtcgattgcacggttatgtgctatgnnnnnnnnnnnnnnnnnnnnnnnnnnnnnnnnnnnnnnnnnnnnnnnnnnnnnnnnnnnnnnnnnnnnnnnnnnnnnnnnnnnnnnnnnnnnnnnnnnnnnnnnnnnnnnnnnnnnnnnnnnnnnnnnnnnnnnnnnnnnnnnnnnnnnnnnnnnnnnnnnnnnnnnnnnnnnnnnnnnnnnnnnnnnnnnnnnnnnnnnnnnnnnnnnnnnnnnnnnnnnnnnnnnnnnnnnnnnnnnnnnnnnnnnnnnnnnnnnnnnnnnnnnnnnnnnnnnnnnnnnnnnnnnnnnnnnnnnnnnnnnnnnnnnnnnnnnnnnnnnnnnnnnnnnnnnnnnnnnnnnnnnnnnnnnnnnnnnnnnnnnnnnnnnnnnnnnnnnnnnnnnnnnnnnnnnnnnnnnnnnnnnnnnnnnnnnnnnnnnnnnnnnnnnnnnnnnnnnnnnnnnnnnnnnnnnnnnnnnnnnnnnnnnnnnnnnnnnnnnnnnnnnnnnnnnnnnnnnnnnnnnnnnnnnnnnnnnnnnnnnnnnnnnnnnnnnnnnnnnnnnnnnnnnnnnnnnnnnnnnnnnnnnnnnnnnnnnnnnnnnnnnnnnnnnnnnnnnnnnnnnnnnnnnnnnnnnnnnnnnnnnnnnnnnnnnnnnnnnnnnnnnnnnnnnnnnnnnnnnnnnnnnnnnnnnnnnnnnnnnnnnnnnnnnnnnnnnnnnnnnnnnnnnnnnnnnnnnnnnnnnnnnnnnnnnnnnnnnnnnnnnnnnnnnnnnnnnnnnnnnnnnnnnnnnnnnnnnnnnnnnnnnnggcatgcgggtgaatcagttatcggcttcagcaccagttacttcaccaccatccgcccagccagctaggggtcaccccagagagggaggttgatcaggtggcggtcaggcccgtttctatgcactttcgggcagacccgatgttattgcttcagatgcggttattacaggtattgtttcaatctgccacaaatattcctctgtattatttgatcctggttccaccatttcttatgtgtcatcatactttgctcgttatttgggtacatgtatctactccggtgggtgatactgttgttgtagactgtatgtaccaatcgtgtgtggtgactattgggggtctggaggcccgagtggatctattattgttaagtatggtggatttcaatgtcattttaggcatggattagctatctccgtgtcgtgctattctagactatcatgctaagacaatcacattggctataccgggtgtgccacggatcgagtggcgaggtgtgactaattttccagtagagttatctcattcttgaaagcccagcgtatggttggtaagggttgtctttcgtatctagcatttgtaaaggatgtcagtgctgagactcctagtgtttattctgttccagttgtgagggattttcttgatgtgtttcctgtagacctatcgggcatgccaccaaacagggatattgattttggtattgacctggtgccgagcactcagcccatttcagtttcaccgtatcgtatggcaccagcagagatgaaggaattaaaggagcagcttcaggaactccttgataaagggttcattcggcatagtgtgtcaccttggggtgcaccagttctatttgtaaagaagaaggatggcactatgaggatgtgcattgattataggcaattgaacaaggtaacaattaagaacaagtatcatttgcctcgcattgatgatttattcgaccagcttcagggagcgagagtgttctccaagattgatctccgttcaagttatcaccagttgaagatcaaggactcggttattcttaagacagctttaaggacccgatatggtcattatgagttcttggtgataacttttgggctgaccaatgccccagcagcgttcatgtatttgatgaacagcgtgttccagtcttatctcgactcgtttgtcatagtctttattgatgatattctggggaattcgcgtagtcaggaggagcatgcggaacatttgagagttgtgttgcagagattgagagaggagaagctttatgcagagttcttcaagtgtgagtttttgcttagtttagtggctttcttggggcacgtggtatctagcgaaggtattcaggttgatccgaagaagatagaggtggttcagagttggcccagaccgtcctcagctacagagattcgcagctttcttggtttggcaggctattatcgccagtttgttcagggattctcatctatcacatcgccttgacaaagttgactcggaagagtgcttcatttgtatggtcagacgagtgtgaggagagcttttagaagctcaagacagccttgaccacaactccagtattggttttgccatcagcttcaggttcatatccatgtattatgatgcttcgagagttgggattggttgtgtattgatgcaggagggcagagttattgcttatgcttctcgtcagttgaatccccatgagaagaactaccctgttcatgatttggagttggcttccatagtccacgcgttgaagatttggaggcattacttgtatggagtatcttgtgaggtgttcactgatcatcgcagtcttcagcacttgttcaagcaaaaagatcttaatttgaaagatggttggagttgcttaaggattatgatatcactatattgtaccatccgggaaaggccaatgtggtggctgatgctttgagccgaaagatagtgagtatggggagtttggcatatattccagttggggagagacctcttgcagttgatgttcaggccttggccaattggttcgtgaggttagatatttcggagcccagtcgggtattggcttgtgtggtttctcagtcttccttatatgatcgcatcagtgagagcttgtatgatgatccacatttggttgtcattaaggacagatttcagcatgatgatgccagagatgtgaccattggtgatgatgaggtgttgaggatgtagggccggatttgtgtgcccaatatggatgggcttcgagagttgattctggaggaggcccatagtcgcggtattccattcatctgggtgccgcaaagatgtatcaagatttgagatagcacaattggtggagaagaatgaagaaagacaatgtgagatttgtagctcggtgtctcaattgtcagcaggtgaagtatgagcatcagagatcgggtggcttgcttcagcagatggatattcttgagtggaagtgggagaggatcgctatggactttgttgttagacttccacggactttgagaaaatttgatgctatttgggtgattgtggatcgtctgaccaagtccgcgcactttattcatgtatgtactacatattcttctgagtagttggcagagatttatattcgggagattgttcgtttgtatggtgtccccgtttccatcatttatgatagggcactcagtttacatcgcagttttggaggtctgtgcagcaagagttgggtactcaggttgagttaagcacaacttttcaccctcagacagacgggcagtccgagcgcactatttagatattggaggacatgttgcatgattgtgtcattgattttggagggtcatgggattagtttccaccgcttgcagagtttgcttataacaacagctaccagtcgagtatttagatggctccatatgaggctttgtatgggaggcggtgtagatctctagttggttggttcgagcccggtgaggctaggctattggggatagatttggtgcaggttgctttgtagaaggtgaaggtgattcaagagaggcttcgtacagcacagtcgaggcaaaagagttatgctaacaggaaggttcgagatgtgtcctacatggttagtgagaaggttctgttaaaagtttcgcccatgaagggtgttatgagatttggaaagaaaggaaaattgagtctgcggttcattaggccttttgaggtgctttggaggattggggaagcggcctatgagcttgctttgccacccagcttgtcgagtgtgcattcggtattttatgtttctatgctccagaagtatattggggatctgtctcatgttttggatttcagcacggctcaattggatgatgatttgacctatgatgtagagatagtagctattttgggtcgtcaggttcgaaagttaaggtcgaaggatatagctttagtgaaagtgcagtggagaggtcggtctgtggaggaggctgcctgggagaccgagcgggagatgcagagcagatatccttacatgtttgaggcttcaggtatgtttctttactcgttcgaggatgaatgtttgtttaagttggggaggatgtgacgacccggccagtcatctcatgagttaccgctccatttcccctatttcttctactttatgctttgtgtatccgtgttatgtggtatcgggttagttggatcgaatccggaatgattttggtaaggtttgagacacttagtctcttttgaggaagcttaagttggaaaagtcaactggatattgacttatgtgttatacggatcgtatgtgaattcccatagttcggatagcttcgggaggtgatttgggacttaggagcgcgatcggaatgagttttggaggttcggagtagatttaggcttgaattggcgaagttgatattttggggatttccgattagtaggcgagattttgatataggggtcggaatggaattctgagagttgcaatagttctgttgtgtcgtttcggatgtgtgtgcaaaatttcaggtcattcggacgtggtttgcttgggtttttgaccaaaagcagaattcggaatattttagaaacttaggcttgaatccaaagtgatttggttgatttgatattgtttgacatgttttaaagattggtacaagtttgaataaggttttgggatatgttggtgcctttggttgaggtcccgagggccttgggtgagtttcggatgatcaatcggacaatttcatgccttggagatgttgcagattatggtttagccgttgcagagcttttactcttcgcgatcgtgtaaggagtctcgcgatcgcgtagagttgtagtgggagcagtccagtttactcagtgcgttcgcgaagatggggatgtgatcgcatagggtgaaggcatttttgatcgcgaacgcggggaatgggtcgcgttcgcgtagagttaagtggaccaagggttttggattgaagttgttcattgcgaatgtggtagccagtccgcgatcacatagtgttgggagcttgatcatcgcgttcttatgggatgttacgcattcgcatacagttaattctgggagctgaggatttgtacttcgcgatcgcgaaggatgtcccgcgatcgcgatgaaggaaattagtcctgggcagaaggtttaaaaggtcgtcttgtccgcgaatgtgggatttatttcttccattgttggtcgttttcagagctttttgaagggaattgaagagtgattcaagggaatcacttggaggtaagattattggaattaaaactcgattgatcataggctaaaaactcgtattttagtcgttgtaacaacactttaattattgcattttacaaaagtttgagcttaatccgacttaagaaataaatttgggatgaatttaattgatttggggctttgaagtctgagtaaaagctaaataaatcaagtcaggatcgagttcaggggtcgcaaagcaagcccggatagcaaaacaaatgaaaaaatgaagcatcacaaaattttgcactgtcgcaccgtgggaggcgccgtggcagtgcaagaatctgcactgcattgtatttctccgttaaaatgcattttgcctctgtccaatccatgtacacgctgcggggggcgctgcggacgtgaaaaaattgcagaattactctatttcggtctaaaaaggcataattgtcaaaaccccttcacacacgattaaaaagagaaaagcatccattattgatggaccagacctgttttgagagagaaagagacgaggagatccatcttggaggatcaaaatcaagaggagacaatactttggatcaaggattaaaagtgtttttctaaactttcttctagtatctatttatttgatgtttgtataattatgagtggctaaaaacccaaatattttagggttatgggtgttagatgattatgttgtttgaaacttagattgatgatcttgaaattatcgttaagggttgtttatttgattctgctgttaattattttactacgtagctaacaatgaaatactatttacgaatcttgagttaaacttgaaaaaggaaattgttgattgcatatagaatcaaatagagcaagatctggatcctgggcatcgggtgaaagattcgcaattaagatagaactatacttaattgccttgtttggttgagaaataggatttgtaaatgcatttgagttaatattaataccatagaaatataggtattgatttaacttgaataggcgcataagaaatcgatagattcttctgggtattattaaccctataatcaataacccggataattcaataaatcatttttaagctaaaaacgtagcatgatctctatcaagcccataaccccgggatatctcatttattaattgttaaaagaaaaactcataagtggcgtagtaactttgcgttgtattattgtttgtctactagttaaattgtaaattggttatttatgtattttgtgatgaattagcttgaatcgataattgtttaagtttgcatcagtcgttaagttaatcataagccctcatgggaacgatactctacttattactatattacttgaagatcgcgtacacttgcgtgagtgctttggtcgcaacaagtttctggcgccattgccggggacttggaaattagctacttgactaagttaagcttttatcagccattggtttaagtattaattttcagttcacattgtttgtgccacgcaggctcttctcttgaatgcggaggagtagaagaacaagcaatctcttccctcttgatcctgaaattgaaagatcacttcatagagagaggaaggagttggaagctagatacaaaacagaaagagagttgggcattttagttcaaccacagccaatagtgatggcaggtaatggagggcgttcggtgatagaagctcgaaggccaaatcttgctaatatgactcaggctattgttaagcctgatatcactgattactttgagcttaaacagtacacggtacagctaattcagtccactaggcaatatgtaggtctatctcatgaagacccgcagaggcacattcagaattttttggaaatcacggatacttacaactatccaaatgtttccaaggactatgtcaggctaaccttgtttcctttttcattgttgggggaagctaaagaatggttgcagaaggagcctgctaattcaatccatacttgggatgatttatcaaagaaatttttaatcaagtttttccccactaaaaagacaaagcctttgcggagccagattcttgggtttcaacaacgggatggtgagactcttcgccaagcttgggaaagatacaagaaactactccgagactgtccacatcattgtcaaactgatgaattattgggccatacttttgttgatggattagatgagacttcaaagatgaatcttgattcagcttgtggacgtagttgcatggcgagactatatagtgaaatacaacttttgctaaacaacttcactgttaatgatcataattggcaaggtgagggagaaccaaggagagcaatgaaacagaaagcagcaggggtacttgaacttgatgatttttcagccatgagagcagatatagcaaaattggcaaatcaaatgaatagaatgacaatgaactagacacaacaattgcaacatgttcaacaaatgtcgatttgttgtgaaatgtgtggtgacaatcatacaagtgacatgtggccaatgaatcctgaatctatttattatgtgagacaacaaagcagaggtccgatgaaccaacaggcacaatatgggaacacttacaatgcaaattggagaaatcatcctaatttctcttaggatggaaatcaattaaatcagaatcaatatagaccccaaggaaatttcaatcaacctcaaaggccacccaacaggtagaagaaagtacaaatgatttgttgaagaaattgttgcatgacaatcaacaactcaaaactgatttcagaaatcttgaaaggaaaatggtcgcaacatctattctaatgttaattccacctagtaaatcatggaaattaagccaaaaattgaaaaactagggcttggaaatttagacttttgattggggatttgaaggaccatttaaggttggatttcagaactttttatatgtatgaactcgtggggagataaggaatctattgatgtaaaaattatcgaattccaagatgtgggcacgggggtcaagttttggtaatttcgggatttatgttgtaaattgattattttcgctcgggcttcattcccttagcatattttgacgtcctcgttctgattttggatagattcgatgcgagtagaggccgattcgaggagcaaaggagtcgcgagctagagatttgactgattcgaggtgagtaatgattgtaaatgatgttctgaggggttgaaatcccggattcgcacatcgtggtgctatattgaggtgagacacacacctggtgacgaatgtggggtcgagcactgatcgaagacaaccatgcactactattgagtagcgagagaggtcgaagcagcttttacctgattaaggtcgggatgatttccataggaatctagaagttggagtcaggtgtctatctaaagtggagttgagtatttgctcttaactaaacttctaaacattttgggttttgttttacttctaattgtatagaactacaatgatcaattaaactaaaataatctaggattaagctattgtgagttgttcaaatgattaaaaggcactagggtagtgactttcgcctaggtggttaattgacgggtacttgagtataagatatgattgtcacatttggggagtatgatacaaccattgcaagattctactcactatacacctctcggtagttcgagtgattttgtccaaattgactttctcaagaccaattgggtatgtaaatttgtaaaagcaatcaaggttcaagttaggtattattatctctaggtttaaccctttaattggggctatcaatcttttgagtacgccccaattccttgttggaccaatttcagagactcggactctctttctcaagaaaagccaaagtcaactaaacacaaactagtgtttgcaaccactaattcagcaattaaacatgaaattagtccaaatatcaaacacccctagacaatcaagcatcaaaacacaagacccatcaattacccacactagggttaagccgcaaccctagcttatgggtctagctactcataattagagaagaaaacaaagaaatagatgaagaaaaactcatattaattaattgctaaattaaacttgaagattcaatgttgaaataaagctaaaattactcaaaatagctaaaaataacgaagtcacgagcgcagccagtgtacaaaattatccgatgacctaaaatgggaaaagaagctatttatactaagctgaatattttggacaaaaatacccctgcggggttagtgcggaccgcacaaaatcacatgcagccacactagggctttggactttaataaacggctctctgaagttgggcaatgcagaccgcacataatcgattgcggctgtggtggcttctagtacggtccgcatgaaatggagcgcggaccgtattaggcttcaaacttggaactgggaactctctgaaccttctctctgcggaccgcactaaatcaaatgcggccgcattaatcctagtgcggaccgcacaaaacctcgtacgtctgcattgccttttttgcctgaatagcagcctctctgaacctcacttgtgcagaccacacagaatggtgtgcggctgcactggccctattttgcctaagcttgttttgtcttggtacttgtgcaagtttcactcctttttgagctgatctttgacatcttgtcaccttgttgatcaaacctgcaatcaagcacaacttgtgagtcttttgggactatttgtacacatttctaatcaaaacttaagcatgaaggagtattaaatgtatcaaaatccctagttatcaactcccccaaacttaagcttttgcttgtcctcaagcgaacaaaataagactcaccccttaagagaaaatccaagagaattcagttatcctaaagtgaccttatctagcatcaattgggactaacaattgccctcaatacaaatgaatcattaacaacatttactcttttaaataccatggattaagtgcaacacaagagcatcaagagttgactcaacacatcaaagaactctttctattactttggtcattgtggaacccaaactcacacatcctcgcatctccctaagtaaacctcacctttagaatagtggtactcagaacgaggttaatggaaattcactcatctctctcaaggaaaagtcacaagtccggctctaagtaccatatgcttgccccttatatgagtcaccactaatgtaagtttcattcaactagagatcatatagggcttttgtggagacatagtgaaggcttttggttccaggtaggtaatgtttggtctatgtaggttccatcttcccttaagcactttttttgtttcattttggcacacattcacttgactttttgagtctcttcacttctttctaaggggttagagagacacactgtcactctttcttatacatttcaaatcttttcttctttctcaactttcaacaccttcattctttacttttcttgaatccctttttattcaattctacattgaacattctttttgtctttttgcatttatttctttttcattgcctttctttttcttcattttatacctttttaccactttgttgccatcctcgtctctccccccaaacttatacttttgccatgtgctaaggaaagattaggtgccaagagaggatatcttttagagcgggtaaaggcttgtagcatggttcttaaaggaaaaaggtccaaggctcaaaagggttgactagggattttattattggtaggctatggaagtgtttaatctatcatttggatcaaggagagcctataatcatgtctcaagtcaaaattcacttaggatttcttctcaacaaaaattcagggcaagttctagaccaatggctcgggacttggacttgcaatgcaatttctcaccacacaagctatgggatcgctaaagacacagagtcgggacccaaaacgaccttagataagattcgagcacacaatagtcccgaaacaccacttgatgattatcggtcaacacaagagtctcaaggtcacgactttcaccaccctaaacacaacaatttgtttttgaccatgaggtcaaatgcgctaggcccaagtgacgctttgcttgaggcacccttaccactaactactaaaagcaaaacgaaaaacggactcaaacccttaagaaggttgtcacgccatccataaatgggaagagctactcggttcacacaaactccacctttggaaagaatcgtggcattaagaaaaccaaaggcttattgcaaacattcaaaacaagaagctacgaacataaataagaagctacagaaaagaaaaatgcagaaagtaaaataaatatttacatgagggaatttaatcgaatatacaatagaggggatgaatatatacaatgtaacataaactttatatacagacccaaagtaaaaagtacgaaaaaatgaaaaaatgtaatgaagtactaaaattatatacataccaaagataaaaagaaagaaatcttaaaatctgtcgaatatatacattcatccaaatcaataaaagtagagactaccccctcaaatgaaagttggcattgtcctcaatgccaactaaacaaaataagcaccaagaataaaagggaaaaggatatagagactctctatggcccgtctgtctgcatgggatcctgagtggtccctggatccttaatatgctcgggaacctcagactggttccctatggcctactgctctactgctgggacctaggcctagacctagacaggctcctgggctgcatcctacgactgactagaggaggtctccggtaggtctgccaactggatgactgcatcatctgctcggggaatcatcctcttcctcttgggaggcctctgggactgctctagctgagggtgagatgttggcacagggtcttgtagcaataaatccaaagcgtctttctgccttcatcctatcaaccttaaccctcaactccttcacggactccttggaagcccgcgtctttctcatcttcttggcctccctagcaagctctttgagagcttttccatatgactccacagcgtccgtaagaaatttttgagtgtcaagaatttttttctagttgtccagaatatccttgagggcatcctcatagactgtaggacctgtagaggtggaggtgtcgactgagatgctactgcagtagtgagggcaaacaacttagaggaagctgtctgcatccaactgttgatgctaagaagggtctggcttagacattgtgcagtcactggatgagccgaggtagagggtatctctagagctgctaaaatggatggaccagggtggatgtccattgaggtggaggcaagatgagtaggagccactaccacaactggctcttcagacttgccagttggatcagtggatgttcccttgtagttcttgcctttcgggttgtcatcaccctgtatgttataccatgagaacggggcctttgcttttaccttgatatcaaatggccgcttttcaactttgcggtccctaaagtacatggtcaagaagctagggaagggttagttctatcaccttcactaactacctgtgtaatcacccgagacatcaccttcccgacgttaattgggtaccctaccatgattgatgctaccaatactgcccggtgaagagggagtgagttttcatgagtagtggggtccaatctgctacacacaaatgtttcccaccccttggcctcgaaattcaaacttcttatcaaaattttcactcccgcattcaaccaatcgggggtgatacctgggtttgccagatactgtgccaaccaaggacagacctcctcacctaattccatcttttccaaatacagcgactcatccttctcatcgaagtccaagtagtcatttattgttttcctatcaaacaacactttcaaattgcacaccttggtcactttggtgcccttcttgatgtgggcaacattggtgtagaattccttgactaggtgctcgtttgcatcctcacaattgtttaagaaatactcccagcccactctatctctaaattgccttctcacattggggttgtgaggcaaaaggtttctatctacaaaaattctctccgaaattaatttcctcacaggccaccattctttgaatttatggtaggccacctcactcacaaagtggtcttgccacacctccggatttctagttcgttctaccctaccaacctggggctgacccccttctcctactacctcttcttcccctactacaccctcttcggataatgaagttgtgggagaggtggagtattcatccccactaccttcagctgagccctcagacgaaccagaagatacatttactgacgcttggacagtggggaaaggtggaagagtgtctcttagtctgtttctctccggccagtcagggatgtactctgggattgagtctgaagatatatctcgggagggctcgtattcactcccagactggtcaatggacctatcagcagctttagtgagcttccttgtgtttttaatgttttgtcgggcttggggagtcaatcttagcatcttctgtttccctccccgggaggactctcccctgcctggttgtttagaacccttgcctcttgtttcaccattgtctgcaaacaacatccattagacttgttagtatcagtagaagaaattaagttcacaattgtagaaaataaaaagatgcagacagtagcagatgttgcacagtgcggaccgcacaaaatataaagcggtcgcatagaggccaatgcggaccgcacaaaaatgctaatactgtctgcatagaggtggtgttcagactacccactctctgaacaattgcaccacggaccgcacaaaatggtaatgtggtccgcattgaggcaccgtggaccgcacaaaatacaaggcggccgcggtggcaaacttcagagagctagtattttcatcctttatcaatgcggtctgcactgattttgtgccccccacactgagttatttgcggccgcacacaatgtagtgtggtccgcattgaaaacttcagagacttgaataatttttccaccatatgccgcactgcataaacacaaacatgtaacatctcacaaccggtcaacctaaaaataaatcctatattacaatgaaaatcaaagaaaaacaagaagaaaaacacatgggttgcctcccaaaaagcgtctgatttaacgtcgcagcacgacgcaagttaccatcaaatcatttgagatgaagaagtgccaccatgtggctatcatcagttttgccgaagtagtgcttgaccctatgcccattcactctgaaaacttccccatttttgttctttaaatcaagtgcaccaaacgggatcacacataccacttcaaaaggtccactccatttcgacttaagcttttccggaaacagacgtaaccaagagttgaacaagagaaccaaatcacccactttgaaatccttactacgagcatatttatcatgaaggtacttcatcttgtccttgtacaaggaagaactggagtaggcatggaatcgaaattcatcgagttcattaagctgctccacacagagattggctgcaatatcccattcaagatttagcttccataaggcccacatggccttgtgctctaactcaaccggtagatggcaagctttcccaaacaccaaccgatatggaaacataccaatcggagtcttgtaagaatcttataagcccatagagcatcatccaacttctttgaccaatcgatcctataagcattgaccgtcgttgacaatatctttttgatttccatgttgtagacttcaacttgaccacttgcttgaggatgatagggagtagaaactttgtgattgacaccatactttgcaagaaaaatgtcaaaagctctattgcaaaaatgagaccccccatcacttatgattgcacgaagagtaccaaaccttgtaaaactgctcttcttgagaaatgcaacaacactctgcgcctcatagttgggaaaagccacggcttcaacccactttgaaacatagtccaccgccacaaaaatgtatgtgttcccacatgagctaacaaacggacccataaaatcaatgcctcatacatcaaaaatatccacctcaaggatggtattgagaggcatctcatctttcttcgaaattccgccccctctttgacattcgtcacacctctttacgagttcacttgcatctttgtacaaagttggccaataaaatccacaactaagaactgtggaagtcgtcctcgccccgccattatggccaccatagggagaggaatgacaaacctccaagatactcaatttctcttcctctgggacacaccttcggatcacaccatccgtgcaaatcttgaacaagtatgtctcataccaatagaaatccaaactatctcgcttgagcttcttcttttggttagaagagagctcacacgggattataccagtcacaaggaaattagcaacatctgcaaactatagcattccattcatcgacaccgaaaggagttgttcgtcgggaaatgaataattgctttctaggccatcacgaggcctcccctcctcctcaaagcttgaagtaacaagacccatcgcatcagtctagctttggaatccttcttcgtcatcaagtatcggagtgcggcatgatcggtatgaataataaccttagcacccatgagatacggccgaaatttttccattgcgaacacaatagacaaaagctcttgcttagtcaccgtgtagttcacttgagcatcatgcattgtcttgctcgtatagtacaccggatgaaacattttgttcactcgttgacccaaaaccgctccaaccacaacgtcgctcgcatcacacatgagctcaaagggcaagctctaattaggtgcggtaatgataggagtggtggtcaacttatgcttgagaagttcaaaggcttgcatacatttttcatcaaacacgaacttggcatctttttctaacaacttgcacaaacgattcactaccttcaaaaagtctttgataaatctccggtagaacccctcatatccaagaaaacttctaactccattgatagatgtagggggagggagacctgaaatcatatcaatttttgctttgtctacctcaataccatgctttgaaattttatgcccaagaactataccctcttccaccataaagtggtatttctcccaattgagaacaagattggtttcttcacaacgggccaaaactctatcaagattcttcaagcattcatcaaatgaatcacccacaacactaaagtagtccatgaacacctccaaaatgccttccaccatatcggtgaaaatggccatcatacaccgttaaaatgtagccggtgcattacacaatccgaaaggcatcctagaaaaaaaaatgtgctatatggacaagtgaatgtggtcttctcttgatcttctggagcaatcaagatttggttgtacctagaatatccattcaagaaacagtagaaggcatgcccagcaggtcggtctaacatctggtcaagaaaagtcaaaggaaagtgatccttgcgggtcactttattcaacttgtggtagtccatgcataccctccaaccagtgatggttatggtaggaattaactcattttgttaatttgcaaccagggtcatgccacccttcttcggtatacattgcaccggtgaagtccaagagctatcagaggtggggtacataacccctgatcacctcctttttcacaacttcttgcattgcctggttcaacttcctttgatgctccaaggagggctttacatcatcttccagaataatcttgtgcatacaaaatgtggggcttatcccccgaatatcagctaaagtccatccaattgcctttttccacttttgaagcaccgctaattggcatcaacatgcatgttagtaagacaagaggaaagaataactggcaaagtagagtttgagcctaagaactcatacctaaggtgtgaaggaagtggtttcaaatccaacaccggaggctcctcaattgaaggctttgttggtggagtcttcctattctcgagatccagagatagtttcctaggttcataagagtaagagcccatcccatgtaaagcattcacgcactccactcggccctcatcatcattgacatcaagattcaacaatacggcctccaatgagtcctccacattgatcattacactggtgtcatcaattatcactattgtgacgaggtccataaaagagcacactttggtactgttgggctgtttcattgacttgtaaacatgaaagaccactttttcatcacccacccgaaaggtgaggtcccctacttccacatgaactaaggccttcccggtagcaaggaaagatctccccaatatgataggaacttcataatccacctcacagtccaagatcacaaaatcagctggcaagataaatttgtccacccggataaggacatcatcgataatatccaatgatctcttcatcgttctatccgccatttgtaatctcatggaagtcggcctaggttgcccaatacacaaaattttgaaaaccgagtaggaatcaaattgatactagcccccaagtcacatagagccttggcaaaatccgcactcccaatggtgcaaggaatggtgaaagcaccgggatcttcaagattcgggaccattgattgcactattgtactaacttggttagtcatttttatagtttcacaatccatagaccacttctttgtcaccaagtccttcatgaattttgcatagcccggcatttgctcaagagcctccaccaaaggcacattaatggataagctcttcatcatgtcaatgaactttttaaactgattctcaattttctacttatcaagactttgaggataaggcggaggtgatcttggaaaaggtaccttggctttaggcaccaccagctccgacatatctattacgtgttccctagacgggttcacgtcattttgagtttccacctcggcatcttgaatatcaatcatcacttcttcattcatattgtcatctatcacattttctacaaccaaaggaacttcatcttcttgcaactcaatatcatcactcaaaacttgcttttgtttagaggcattcacatcaccgcctcgtccactccttgtagttactgccataacatgattgttctcaccctttgggtttactactatatcacttggtagagcacccttagggcgtgtattcaaggactgagagatttggcctatctgaacctccaaatttctgattgaggtattgtggaaagccaactgtgcatcagaatctgcatttttcttcatcatctgttcgaacatcatttcaattctacccatatcattgctagaagaactaggaccttgggatggaaatgggggcggattgttcggtnnnnnnnnnnnnnnnnnnnnnnnnnnnnnnnnnnnnnnnnnnnnnnnnnnnnnnnnnnnnnnnnnnnnnnnnnnnnnnnnnnnnnnnnnnnnnnnnnnnnnnnnnnnnnnnnnnnnnnnnnnnnnnnnnnnnnnnnnnnnnnnnnnnnnnnnnnnnnnnnnnnnnnnnnnnnnnnnnnnnnnnnnnnnnnnnnnnnnnnnnnnnnnnnnnnnnnnnnnnnnnnnnnnnnnnnnnnnnnnnnnnnnnnnnnnnnnnnnnnnnnnnnnnnnnnnnnnnnnnnnnnnnnnnnnnnnnnnnnnnnnnnnnnnnnnnnnnnnnnnnnnnnnnnnnnnnnnnnnnnnnnnnnnnnnnnnnnnnnnnnnnnnnnnnnnnnnnnnnnnnnnnnnnnnnnnnnnnnnnnnnnnnnnnnnnnnnnnnnnnnnnnnnnnnnnnnnnnnnnnnnnnnnnnnnnnnnnnnnnnnnnnnnnnnnnnnnnnnnnnnnnnnnnnnnnnnnnnnnnnnnnnnnnnnnnnnnnnnnnnnnnnnnnnnnnnnnnnnnnnnnnnnnnnnnnnnnnnnnnnnnnnnnnnnnnnnnnnnnnnnnnnnnnnnnnnnnnnnnnnnnnnnnnnnnnnnnnnnnnnnnnnnnnnnnnnnnnnnnnnnnnnnnnnnnnnnnnnnnnnnnnnnnnnnnnnnnnnnnnnnnnnnnnnnnnnnnnnnnnnnnnnnnnnnnnnnnnnnnnnnnnnnnnnnnnnnnnnnnnnnnnnnnnnnnnnnnnnnnnnnnnnntgctggtacattaggggcctttgaaagccttacccccggtttccttggtttctattgttccatccaccttgattgttattaccaccccatttattgttatcaccattccaatttccttgatggttttgattgttgttctgatcgccccagttgttgttttgattgtttctcccccaattaccattgtcgtgttgttgttgattgccccaattgccttgggatctccattattgttgattgaaagaattgcccctctggccttgataattaattattcatatacggcacctcctcattttgttcatcataaccatcattttggaatccaccacaactattgtcaaatttctccgaattcccttagttttgttgccctctttgtctttttttgttgacaagcatgttgacaccctctatagcattcacttggcgaggattttgaacttgctgcaactgtgcctttgctaattggttcattatagttgtgaactcagctatagtctgcccatgatcatgtaactccttgtgcaaatgagtaatcgtggggtcaccctggggcacattagctctactttgccaaagtgtcagccatcttgtcaagaatgtcacaagcctcatcataagagagcttcatgaagttgcctccagcaagttggttcactatgcattggtttgtggtgttaataccccggtagaaagtctgttggatcatcaccttggtcatatcattgttggggcagtccttcaccattgttctataacgctcccaaatctcatgcaaaggttctgtgggatcttgcttgaataccaagatctcatctctcaatgcatccatatgccccggtgagaaaaattttgcaatgaacttatcagccaactcatcccaagtagtgatggaatggttgggaagtcgctcaagctaatcaagtgctttccctctaagtgaaaatgggaagagtctcaaccaaagtgcatcctcggacacatttgtttgcttgctcccccaacaggtatccacgaaccccttgagatatttgtaagcattttgatttgcagcgcctgtgaaatacgcacactgctccagcaatgtcagtatcacattggttatttgaaaatttcccgcccggattcggggtggaacaatagcacttgcatagccttggttcggaagcactctaggagccactcttggaggtggcggaggagggtctggaatattatcatttacattagcattggcctggcggcctctacgttgtccttgaggtacaagaggcacctcatcatccccgatatcatctacctcctcccccacaatcacatttccaagagggccattggcgttgtttgcttccatttggtacctgaagttgtgacacacacaaattagtaacaaagaaggaaagaagaacaatacacaaaactatttagatagatagccaaaannnnnnnnnnnnnnnnnnnnnnnnnnnnnnnnnnnnnnnnnnnnnnnnnnnnnnnnnnnnnnnnnnnnnnnnnnnnnnnnnnnnnnnnnnnnnngcgccaaaaaggtgatcgaagctaaccctacactactattgagtagcgagaaaggtcgaagcagcttttacccgattaaggtcgggatcgatttccacatggagctagaagttggagtcgggtgtctatctaaagtggagttatgtatttgctcttaattgcacttctaaacattttgagttttgttttacttctaattgtatagaactacaatgatcaattaaactaaaataagctaggattaaactattgcgagttgttcaaatgattaaaaggcactaaggtagtgactttcgcctaggtggtcaattgacgggtacttgagtataagatatgattgtcacatttggggagtatgatataaccattgcacgattctactcactctacacctctcagtagttcgagtgattttttccgaattgactttctcatgaccaattgggtatgcaaatttgtacaagcaatcaaggttcaagttgggtattactatctctatgtttaaccctttaattggggctatcaatctcttgagtacgccccaattccttgttggaccaatttcagagacttaggctctctttctcaagaagagtcaaagtcaactaaacacaaactagtgtttgcaaccactaattcagcaattaaacatgaaattagtccaaatatcaaacacccatagacaatcaagcatcaaaataaaagatccgtcaattatccacactagggttgagccacaatcctagcttatgggtctagctactcataattagagaaggacaaagaaatagatgaagaaaaattcacattcattaattgctaaattaaacttgaagattcaatgttgaaataaagctaaaattactcaaaacagctaaaaataacgaagtcacgagcgcagccagtgtataaaactatctgatgacctaaaaatggaaaaagaagctatttatgctaagctaaaaaatttggacaaaaatacccctacggggttagtgcagaccgcacaaaatcacatgcggccgcactagggctctggacttgaataaacggctctctgaacttgggcaatgcggaccgcacagaatcgagtgtggttgcgatggcttctggtgcggtccgcatgaaatgaagcgcggaccgcattaggcttcaaacttggaattggcaactctctgaaccttctctctgctgaccgcactaaatcgagtgcggccgcattgatcccagtgcggaccgcacaaaaccttgtgcgtctgcattgccttttttgcctgaatagcagcctttctgaacctcacttgtgcggaccgcacagaatgttgtgcggccgcattggccttgttttgcctgagcttgtcttgtcttggtacttgtgcaagtttcactcctttttgagctgatctttgacatctttttaccttgttgatcaaacctgcaatcaagcgcaacttgtgagccttttgggactatttgtacacatttctaatcaaaacttaagcatgaaggagtataaaatgtatcaaaatccctagttatcaagcactattggggattgtgacttggtccgtcctgattgatgattttaccgcctatttgactgaaatctattttctatcatcactatttgggctgaatgccatatttgggcttcgtgctaactatttgaacccttcggtgatttttattgatatttcctcactgttttgactttatgcttgaactcagtcatgttattttccattgttttcatactcagccatgttttactcagtttttatacttaaatgatattttaaatgatgtttggactgagaaacactgttttactattgctcgagtggcttgtgaggatttttgactgagtaaggtcgagggcctatgttgtgaggaaacatttgatactgattatgaggccgagggcttgagatatgtacgccacgaggtgggttgattgatatgaggccgagggcctagtgatgatgccacgaggtggcttgatattgcgtttgggccgtaaggggcccctccaggagtctgtacacccccagtgagcgcgggtacccattgtgnnnnnnnnnnnnnnnnnnnnnnnnnnnnnnnnnnnnnnnnnnnnnnnnnnnnnnnnnnnnnnnnnnnnnnnnnnnnnnacgagattgagcacgaggggctagtattgttctcagatactgtcatcttcttagatgttgcccgagggacggatttgttgatactgtgcccgaggggttaacctttatgtgtttattttcataattgactatcaattacctgcttaattgttgaaaaaggcttttcaggaagtaaatttgagttacatgatttttacctatctttcactggtttactgttttaaaaaggattttcactgcttcattatagcatgcttttgtgccttacgtgatttcctgctttcagtctttatttatgattattactcactgagttggagtactcannnnnnnnnnnnnnnnnnnnnnnnnnnnnnnnnnnnnnnnnnnnnnnnnnnnnnnnnnnnnnnnnnnnnnnnnnnnnnnnnnnnnnnnnnnnnnnnnnnnnnnnnnnnnnnnnnnnnnnnnnnnnnnnnnnnnnnnnnnnnnnnnnnnnnnnnnnnnnnnnnnnnnnnnnnnnnnnnnnnnnnnnnnnnnnnnnnnnnnnnnnnnnnnnnnnnnnnnnnnnnnnnnnnnnnnnnnnnnnnnnnnnnnnnnnnnnnnnnnnnnnnnnnnnnnnnnnnnnnnnnnnnnnnnnnnnnnnnnnnnnnnnnnnnnnnnnnnnnnnnnnnnnnnnnnnnnnnnnnnnnnnnnnnnnnnnnnnnnnnnnnnnnnnnnnnnnnnnnnnnnnnnnnnnnnnnnnnnnnnnnnnnnnnnnnnnnnnnnnnnnnnnnnnnnnnnnnnnnnnnnnnnnnnnnnnnnnnnnnnnnnnnnnnnnnnnnnnnnnnnnnnnnnnnnnnnnnnnnnnnnnnnnnnnnnnnnnnnnnnnnnnnnnnnnnnnnnnnnnnnnnnnnnnnnnnnnnnnnnnnnnnnnnnnnnnnnnnnnnnnnnnnnnnnnnnnnnnnnnnnnnnnnnnnnnnnnnnnnnnnnnnnnnnnnnnnnnnnnnnnnnnnnnnnnnnnnnnnnnnnnnnnnnnnnnnnnnnnnnnnnnnnnnnnnnnnnnnnnnnnnnnnnnnnnnnnnnnnnnnnnnnnnnnnnnnnnnnnnnnnnnnnnnnnnnnnnnnnnnnnnnnnnnnnnnnnnnnnnnnnnnnnnnnnnnnnnnnnnnnnnnnnnnnnnnnnnnnnnnnnnnnnnnnnnnnnnnnnnnnnnnnnnnnnnnnnnnnnaattcaggcttatctggtcccgctcccgagtgttgatcattctggctcaggcggatccgaggagtctctaggtagctattggcgttcgcagcccggagcttccctatcatacttctttatgttcttagtttctgtattaaactctgtagtttgatttgtagtattctgaattgtttagatgctcattactagtgacaccccggtatcgggctgtgtttgggctgtatttcacatattatactatcaattgcttaaactttggtttatttcttcatgtttagacggtatcttaaatgcttaattgttaataatcggataatggaaagtgtcggctggccttgtcttcacgagaggcgccattacgaccgggtctgggttttgggtcgtgatacattatcaatacaaggaaaagaaaattttcacaattctttcatgttttctttcaggggtaggtttgagggaaagaaaaaaacctccatattttatgtttactatttcaaaaaaaaaggagaaaaataattcaaaatgaattagtgaaatagagaaactaaggagaaaattttttcgtgtagctgtaactaactgccttgccaatggcaccttgtacacttctattaatgcaggtgtcactgaactatttaggaatttgcaattaggttctgatccgtcacaaatccgtcgaggatgctatttttatggttttgcgtcggattggtccgtcgcatattctaaaaatttggtggtgaaaaaacactttgatcgaaaactatcgatttatatttgtctatttatatctatattattataaagtatgaatacaatgtcggtttacaaaaaaaaaattataatattaaatataataactcacaataaaagaacattactgaaattcttgacattaatattgtaatcctattaattttaggacataagactacacttaggaatcctaaataaaccaaacgaagaaagacaaaactccaaattggaaggaactattatacattcaaagtcataaaactacggtaggtttatggcttcatatatagcaagagagttcttctggtgtgatcttttaagcaactaaaagtaaaaaataacaaatagaaaaaaagatgtaatatgtcatatatctatgcataaagagtataaaatttatttaaaagttaaaacacaaaagacagatgttgtccttttcattttttatattttttgctttttaagtaatatcttaatttggtctattctaaattttaagttgcaacaggtaagtcattgttatgtttactactttagtaaatcagtataatatttgaaaatatgtaggtattctttattttgtttagcgacgtgattatttagttaaaaaaaactaaatggaaggtttagagataggtcgttgaattctctttcctttatattcagtaaacaaaaattacttttatatcgtaaaaactgtgaacagactcatgaagattaggtgcaaagatcaaatgaaagcaactaccatatagttttgtgcttacgagttaggaaaattatgcaattgataatactgctaaaacttatgttgcagaaagcaaattcttgtggtgctaaaatactgagttttcatctgcaacattgtactcttttattttatcttgcagattttaaggtgagtttaacgttttaattataatttgtaaatatgacatacttttattttctattttacatgtaaacatagttactctataaggcgggaagaaattaaaagtgttaaacatacgatctagagtttagaaagaacgaatgagtcatgctcattaaaatagaatctaagattttctcttgtgtttatttatttactatacttttatgtaatatctatttataataccgtcaaaatgacttgtctcttcatgttttagtttcgattaagatcaaattctttaatttttctggattttatagtatttgttttaattaaattagaatgttaacctttttgtttttttccatcgtaccttttaagtaaaaattaaacagtataagcaaattatatagtataattatccataaaaaagaaagtgaatcaatatggatatcttacaaaataagagaagaggataagaaagaacagaaataaccatcttaaagttgattgattatcttttgcaggtaaatataaatttatgttgaaagaatatttgaaattcttcctaatgcgtatgaaaaagactaccatgatgagaaaaaaacttatggaaatggaaggaatatattttttaaatatcatagcttattctttgtgatcactataacaattaaattaatttctaataatattattactgtagacatttagaaataaaaaaagttagccactaatgctatcatcattataatagaattagttagtctgtccgcgcttcgtgcggtcataaaaaggtgaacttatgatgtgatcttgttgtaaatttaggtgagatagagtcaacaaaatatttcaaagctcctcatattacaaatttcacgactaatttttattacatatgaaaaatagacaaatgattattctctaacatatgattatgaacatcactaatcccaagagataatatttaaaattgaaaattttcaattaacagaaagcctccccacgtaaaaatatcaaattcttgaactttgctataaagcattgaccacatcgttctctacacctgtatttatcacacaaatgtttggaatggtcaaagcttctatatatgcacatacttatacttgcgattacgtatcttgttagttgatcatcaccaaagtgtcatccatatgcagttatgttaatctccacctccaatggtgtacgtaaaattcaaagaccaccaaaatcaaaagaccaaagacattaagatcacccacgtttagtttagactatagagctatctattacgttaaagtcttgtcaaagaaggttttatttatgtcaagaatttagtaaatctggtaaattatataaatttaactgaattaaagtataaatttataataactaacagaggaagtcctctccttaaagcatcaaccgtggtttctccagttcttggtatatatagtgatgaacttcgttggagatattacttttgaattgcaatatgaaaaagaacacttcaaagttcaatagcaatagttgaacaacagccatgactgcagaaccaatgatgaatagagaggaaaaccattgttattccatgagcaatgattgttgaacaatcctgcagtttgtgaacaaattaatgagttttgacaacaaatattttacaataaacgaaaaaggacagagttcttagtgtaagagtttccaactgttagtcgtgataaacataccaagaataattgccattaatataagattatcatgagaaagaatggatattgatttggctatacttgtagatatttcaatgttccacctgaaacgattgaaaactatatgttgaaagagaaaaagtgaaagagcaaaacaaatggcttacttacaagaaaattaatctgaatggctaaaaatgtccggtgaaaaagaagtacaaaaacccaaaaataatacagtcatttcaagaattcattttcatgttatggattttcagatctgtaagaaacgcttaagatcacacaggaacgttgaccactatccaattcctctccattttcttaatatgctctttgcttcttcataaccatttcttggcaattttaaagaaggggaaaactgtagcaaatgggtactaaataccggcaggtgggaggaattaagaagaggctaattaagtgaattaaagatgtgaccgttttcttgtaacggaaaagaagcgtgttcagtttttcttagtagaacattttaaaaaatggaaaaatttaaggaaaatgctaaaaaaaataacaaaaaagataaatagtaatgctggtcaatggagggtgccacatcacttattctatccccaactttatatatatactagggaatttgccgcgcgtttcgcgcgatttcagaaatagcagcccatttcgaaaggattttatttataaatttattaagaattaaagatagaatttttcagctgtttaactaaaaaactaattttatatattgatgaaaaaaatcacaagataaatgttcttgtaaaattagagcttagaaaactacattttttattatcaaatattcttaaaaatgaaaaaaaaacttttaagggaaaaatcatatatttttttgtggagagagattaatacatgattctcttagtcttatatatttcataatacatgatctaaggacttgatgtttttaaattttattagatattagaacttttgtttgatgaacttgtcttctattcaaataaataaaagaaaataaaacgaaaagcaacgaaactaagtacccgtttggacataaaatttgatggaagatttcttcaaaaaaaaatcacttttttttcgaaatcagcgtttgttcataaaaattttaattttcacttgaagatgcatttaggaaattttcgaaaatttgaaaaattgcaaaaggttgtttttcaaaattttcactcaaatcactcataaaacttcaaaaacaacccaaattgaaatttatatccaaacacaattctaaatttcaaatactattttcactttaaaaaaaaattcaccatttttttgaattttataatttttatgtccaaatgcctactaaaaagtccggaaaaaaaacatattacggacaatgcctgcttgtacacatttaatttccttcacaatcttcccagaagcaactaattagtagtaaatccaagaatttttctcacatcacttttcagtcacttccaatttaaccaaaannnnnnnnnnnnnnnnnnnnnnnnnnnnnnnnnnnnnnnnnnnnnnnnnnnnnnnnnnnnnnnnnnnnnnnnnnnnnnnnnnnnnnnnnnnnnnnnnnnnnnnnnnnnnnnnnnnnnnnnnnnnnnnnnnnnnnnnnnnnnnnnnnnnnnnnnnnnnnnnnnnnnnnnnnnnnnnnnnnnnnnnnnnnnnnnnnnnnnnnnnnnnnnnnnnnnnnnnnnnnnnnnnnnnnnnnnnnnnnnnnnnnnnnnnnnnnnnnnnnnnnnnnnnnnnnnnnnnnnnnnnnnnnnnnnnnnnnnnnnnnnnnnnnnnnnnnnnnnnnnnnnnnnnnnnnnnnnnnnnnnnnnnnnnnnnnnnnnnnnnnnnnnnnnnnnnnnnnnnnnnnnnnnnnnnnnnnnnnnnnnnnnnnnnnnnnnnnnnnnnnnnnnnnnnnnnnnnnnnnnnnnnnnnnnnnnnnnnnnnnnnnnnnnnnnnnnnnnnnnnnnnnnnnnnnnnnnnnnnnnnnnnnnnnnnnnnnnnnnnnnnnnnnnnnnnnnnnnnnnnnnnnnntttttttcagttgaaattaaaaaattattttttttagattttttatttgtaaaagataaatctcttatgtgtaaaacatagatctctaatgtgtaaaaacaaatctcccataagttaaaaaaaaaaaaaagaccgaatcataaacctaaaaataactttgtaatggcccacaaaatcatttgactgcagttataatatagttatatatattccaaaatagagggaatgggaagtattaattattacataaaaagaaatagaaaataattgatataaaaatttataataaataaaaacgtgctatcacttcaagaaaatttataccattagaaatcaaattagaaattcacttctaagatcccaaagaagaatgaaacaataaagaacaacatcaattaaaaatcataattacctgtcaaacnnnnnnnnnnnnnnnnnnnnnnnnnnnnnnnnnnnnnnnnnnnnnnnnnnnnnnnnnnnnnnnnnnnnnnacaacgcatcaatgaattaccaaaaagcaaaaacatgataaataaaatggcatccaccatataagagaaataaatagaacaaacaacacttgggaacatttattgtcaggcaaaaataaaacatcaatgaattaccaaaaaataaaaaattatgataaatggatttacatccaaggtagtattgttctaagcctacaattacaaacagataaagaacctgcaagaaaagaagattccaaaagaacgaaaaaaagaatgaaaaaataagttggtggtgagcaactgattaaatttgtgttactttcatctaaagactatttagtttgtatgatactaaataatgttccaaatttattcacggtaaaaaattaaatatctgtatcttatatatatgaaattttcaagaaagatacctggaactattccgagagcattcacagtttgaaagtttgtttggtataataacatctgcagttgcaaaatttcccgtattggcgaaaatatgaaatttagaattaccttatggaacatgatgagttttgactaagcttgttgggaagctgacagaaccttgtgtctacagcctctagcattttgttgggttgttactaccttcaaacgttataattattaggaagaaactaaagaggtggggaaaagaaaaggaagagatagatgcgcaataaagagaatttagagtgaagcagtaattattgagtcatttaatgttatcaaataaggcacataaaaatagaagaagaagaagaagaagaagaagaaaaataagaggaaaaaaaaaaagataaatgtgtttcttggccacagaggtatgccaaatcatcttgcctatgcccacttatatatatatatatatatatatatatatatatatatatatatatatatatatatatatatatatatatatatannnnnnnnnnnnnnnnnnnnnnnnnnnnnnnnnnnntgttttaggaggagcataattttcatcatattctatttttattgtgaatagaaatattataaagtcttaccctttgataaataaaacttcttatttcctataattgttgtagaactttgattgaataacgtgcaaccaaacgtgttcgcacaagaatttaacttcctacactaaaaatgactaatattttttaatacttttacaacaaatgctcacggctcaatccctaatattgaattatttgtcttaccatgattttccatttgggaagtaacaaaattggaaatgtatacttagaacatcatttttaaattaaaaattattaagaggatatgattctaatattttgttcctcataaaataaatataataaaataaaaataacactaactaaccttaaaaatttatacgattgacgggaatatcgtgcaacgcatgtttgctcggagttctacagatatattggatatcaatgaactgtttggtgaaaaaataatcaatcatattaaatatgtttaaactataatatataattatctaactaacataactaaattgatcatttgtgtaagttctgatgatgtctttttattttgaatttatgtattatgctaatgtaataatatttttcactatttagatgattgttgtattattatacataaaatttatgttacaccctgtaactttaacaaacttgataccgttatatatgtatttgatatggtattttgagtaaaatatttttgtgatgaaaaaaatagtttgaaaaatatgactttatatagttattaatattactactttcgaatatgttttaaattatacacctaatatgagaaaagtttatgggattcctttttttgtaaagatatgaattattttcttacaagaaaagaaggttattttttttttaccattttaagaattaaggatacgaaaatttgtactctttatgtgagattaaaaaaattagaagttgagaaaatttatgcattttttacacgtatgttttaataaaataataagtgtatgtatttattttgtatggcaccacatgaccatgataataaagtatattatatgttattgtatgatatataaagtgtattaaaagtgaatagtactttaagtaatttgggataattcttaattgtgtgaataattgggtaattaattcaatattttggataagcttgctcatccttaacgcggcagcaagccaaccatatatgattatgactccgacgaatgcggcaggccgaaaatgacattgcaaacatcagtcgtgactccgacgaggaccgacaaacggcagccatcgaaactgccaatattcatggcaaatttgaggacctccaacaggagcgtgccgacgatttagcccatcagcaacatgaggcagacagactgactgccatgcagcaaaccataaacgacttgactgacaagctcaacgttgtcaatgctgccttacagagcctacttcgagaaggcgatcatcacatcaggggtgcaacaaacctcacccccattccacaaaagcttaagttggtcattaattaataatagatgtggcaagtttagaaatgtaaggatttggcaaatcttataaagtgagtcatttatccacttttaagaaagagttaaatattcattcctaacatattcattcttaagtaagcaaataagttctctttgttatgaaataaaagcaatttagtaaaacgtgaacaagaaatagagatagagagaaggaagagattttcttcttcaattgtgtgtattttcctatctattacaaggcctttatataggcataaatagtgaagaaaatatgtcagggaatatgtcattgaacatacaaattatgtcattgaatatgtcattaagcatttgagatgaagatcatggaggaagagtagacatccaccataatatgatatttatcataacactcccccttggatgttcatagataatgtgcctcgttaaaaccttactaggaaaaaaccctatagaaaaaaaattatagtgaaggaaaaagagtacacaggtttagaaatacgcattttggttgccccgttaaaaaccttgcaaggaaaacccagtgggccaaaaccttgtaaggaaaaaagagtacaacgcatatcaactccccctgatgagagcaccaattcacatccttgatcattcacatcccaatcttgaacactagtttcttgaaggcgtgacaaaactttttcagttaatgtcttagcgagataaagctctactcctacaaggaactctagagggtgtgtactctatggagtgacctcacaatcatcagggtactctatggatgtgctttatccacatagaatcactttaaaatcttttcagtgtatgctgattgatggacaaaaatttcatctttcatatactcaatctgtaggccaagacaaaattttattttttgtctttaaaaaatcattcatttcaaattctttctttaaacagtctactgcttcaggaagctccttgggagttctaatgatatttgaatcatcaacatacacgacgattataacaaattcaaatccagatccttttataaagacacaaggacaaattgaattattcttgtaccattctttcaacaagtactctcttgggcgattataccatatgcgcgctgattgtttcaatgcgtataaggattattgaagctttatttaataaacttggaaaccataatatgcttcagaacaatttaaatccttcaataatttccattatacgcatatcaagtttttcatatattgccagattaaaacctgaaatgccaggatatttataaatcttcttgtgacacaagtcgtctttatgtctatcgacttgtctttcttcttacaagaacacatttataccttcactggctttatactttcaggtgtttggactatccgtccaacttcacatttttcaggtgaaatcaatcttgattgcgtattttttatttggccaatcatttatctatccaaatttcatgacagatttgagctgaagatcctcgtcaatattaataatattgagtgcttcattatattaacaatatcgtcgacgatcactttacgtcggttccattattacctaataaagacataacttattgagatctctttatctcattgttttcaggtaactgagcctctcacatgaggtcttacgaagtgttatatcgtggtgctcttctagatcacttgcctccttattatgaccatctcgaacattttcccctctccttcttcaaggagttttatctttggaactgattggtctgttacgcttcatgcgtgccatagactatgtccctcatggacgttattctatttggagtattagcagctgaaatatgacatttagctttggtcagcaaatgcgtctggcaataatttataaattaattatcacttgaacttcaagttcatattttcttgtacgaggatctatatgtattcataataattcatttcacatatcactttctcagctatccattttctccccctaattttgggatcaccaacatatttcccaaccttctttgggaacccatctttgtgcattgtggtggcataattaaatcatatagcacattcatatttctatatagaaattatttggttcctgaccctgaatcgattgtgaaagagagaaattttcataacatggctagatgcgtacaagttctggtgtatattacataatacatctcatatcaaatttcatttttgggagttttgttctcataaccaataatttagctataattggaggcattccgctaaaccaacatggatttaaaccagtattatcaagataaatcatcataatttacattctggagctgtgctctaataatttgagcaagcaatcttgcaaaagccaaactgcaagttgataacaaatgcacatgtcaccatagaatagatgcacctattaaaatcatataatagaaaacgatccacatggcaggtgactgggcccatatatttatcaccttttattcgttctagaaatcaagggattcaatcccaacttttaactggtatatcatgagaataagcagcgtaagggaattcttgaagaatcttctattacttcaatatatgccaatgtaattttcaattaattttccgcatcataattgaaccgggatggtcaactggtcatgccaactaatatttgttttagtaaacctctagcttgtggcatatgattccagcatcatgcttatatttgtgtagtacaaatagaaagaaaatcgagtaacctttcatatttacctggtataattatagaaatatgaagatattcaatcttcctttcatttatagtctcaatatgccaactactttnnnnnnnnnnnnnnnnnnnnnnnnnnnnnnnnnnnnnnnnnnnnnnnnnnnnnnnnnnnnnnnnnnnnnnnnnnnnnnnnnnnnnnnnnnnnnnntcttttgagactttacaatatcaatgtcatgaataattttattcatctagatagtaaaaaattactttccggagctcttaacaatttttgtactacaagatcttttgccacaccattcatatgataaatgattccttcatgaacaaaattatatcataataaattgtcattgtcaaaatcatcataagcaacgtcattttttgctttaattttgctcttaataacttttataaggaataccaaaatattttggggtatcacatgtacgagaccaatgacatattcatgtaaccacacaatactatttattctctttatttctctcaaacctccctcaaaggtgagttgtgtggtactcatccaatcatgtcttgcatgtctttattcattacttttatcatatattactacattcacctttaggaatgggtctacattctcaatgtttatcactagtcacattctcttcaaggaatggatcataatcagtgacgtgcttcataccaatttgatggtaaacattgccttcacattttgaaggattattttgagaacccttgttgttctccttttataatcattgcgatgattattattatttggaacactcgcgttcattgttcaaccacttgtcttcatttagacttattatgcactgctaccacattcacttcaagaatggagctattcaagtgggacaatcttcatgccttttcatgaaaaatattttttttctttagtcatcattatatcatcaatatggtacattgggactcaaacccaatgtcttaccaatataaagacatgttacgccataataaattgggactcaaatccaactcttatcattatggagcatcaggacttgatcccgatgtcttaccctcaatcaatggcataataggctaaacaatattgagattcattcccaatccttaatttcaatcacatgccaagaaagttgtacagagttaatttgcaacttagcaaatcaaatttgctttcttaaataagtgtacaaatctcaaatcagtgtaaaagctttatcaattatttgtagcatctatatgaaatacaaccgtttgtaatcagaatatttcttctatattgtattagagtttaaatggatcataaaataattatcataatatttattaagtctctctcaaaaatattgttgttttcgggatatatcctacctattggatttggtttaacgccatgactttccttcactcaattcaaccaagcaattagtgaataaatttatcaaaagtacaacatatatgtaacaacagatatatagtactaatacataaattcaatatttatattacctgaaaagtgacattataggtaacaacttaccagttgtagcttatggatcattcatataaaatacttgaaaatggtaagtcagtagcaagcatcaagtagatcatgaatactcaaaaatatctctgctagtagtcatactaatcattgtttgctttcaaatgatacgaccataaattatgaagtatactttctcaatagctggtttgttttccaaatttcaaagaagtaattaatcaacctagataaagatgtgaagtatttcttgttttcttcaagatgatttatgcttctaatcagtatgaccaattttattttatttttaattttttttattcctttttttggtaccatatgcaagtgtaaaaagtttggtactatatgcaagtggaaaaaggatatagcatagatattctgatgcacaggataatcaagatgtggttcctttattactttttacctttccccataaattagctgaactaaatccaaagaaggataattgcatagatattgtatatatttttgaattctcgtttgctaaatgcttgaaatgatttttggccacgatcttctctccatgttgtatgatttgcgtgccaaatttttgtgtcgtctgtactgatggttttttgcactggtattgctttgaagtttgaagatactttaaattaatttcccacacctgcaataaaaaaaggaggaaataaatcatgggatttagtcaagaggggaggatgtgacgacccggccggtcgttttaagaatttaggcttgaaatgccgaaagttgaatttttgaagtttccggttcgataatgagattttgatccgagggtcggaatgaaattccaaaagttggagtagctccgtagtgtttaatgtgacgtgtgtgcaaaatttcaggtcattcggacgaggtttgatagaccttttgatcgaaagcgtatttttagagtttttggaatttttaggcttgaatccgatgaaaaataggtgttttgatgttgttttgaccgttctgaaggttggaacaagttttaatgatgttttaggattggttggcatgtttggttgaggtcccgggggcctcgggtgtctttcggatgctcaacgggtcatttttgaacttagagaattgcagaaaaatgttgcagcagtcagttctggtttccttcttcgcgtttgcaagtggggtctcacattcgtgaagaggagctggggatgttgaggaattaacgcttcgcattcgcgaaggagcttacgcgttcgcgaggctgagggactttgtgcctatgcattcgcgaaggcagtctcgcattcgcgtaggggaagagaaatgatcatcgggttcgcggctcaggcatcgcgtttgcgaagagggagactggtgtgtggaactttagtgcatttcactctcgaccgtagcctcgcgttcgcgaagaagaacgcgcctgggcagaatgtttaagttcaaaatcgagggtttagccatttttatcaaaacttaagnnnnnnnnnnnnnnnnnnnnnnnnnnnnnnnnnnnnnnnnnnnnnnnnnnnnnnnnnnnnnnnnnnnnnnnnnnnnnnnnnnnnnnnnnnnnnnnnnnnnnnnnnnnnnnnnnnnnaattttgagggattttcagagatatcgattgggtaacgattcttaactccttttttcttgtaactcattaatacaaacgtgaattcatcatttaatttcggattggagatgaaaattaggaaaaagttagaagaaagttcttagacctagaattcgacttttgattgggaatttgaccttagatttggataattttggtatgcatgaactcgggagagtgtgaggattctgaaaatataaattttacccgatttcgagacgtgggcccaaggggtgttttagttattttacctaatttcgcgtattagcttagaatttctttgtagaatcagttacttgaagtgttatttacgttatgaaattgaattgaatagatttgggtcatttggagtcgagtactcgtggcaagagcgtggtttcagattgattattgagccagttcgaggtaaatggcatgtctaaccttgtgggggggaccttccccttaggattggtatatttggtaattgaaatgtcttgtacgtgaggtgacgagtgcgtacttgtgctaattattggaaatccggttttcattaagtaatcactagtatgttcctttcctgtttttattacttgcattattatgcctgttgttagcttaggaaagcatgtctaagtgacttaattgttttatttgctcaacctaccttacttgaattatgtgcagcatactaggctagaatcatttgttgccttaatatgaaattttgtcatttctgtatattttgctgttgctgctgcatatttatttgggactacggatgtgggattccggtagctcccccttgtatgtttattttgggactacggatgtgggattctaatagttcccccttgtctttttattttgggactaccgatgtgggatgccggtatatccccctgcacaattatatggaactacaggaatgcacccggtagattccccccgtattgggtatttacatttgggactacggaacaggattccggtagatccccgcgcactatgagttggactatcctggaagatccatcggatatgtatatatggggctacaggatggtatcctggtagatccctggttgttattttggtgctaagtcgcatttctttccgtgttttgccttgtgtctgtaatagttgttgttgtccctttttatatcctgtgttacttttactgttgtatttatttatattgttctgttctacactgtcaaaatttatactttatttaacctcagtagggccctgaccttcctcgttactacccgatcgaggttaggcttggcacctactgagtaccgctgtggtgtactcatgttgcttctacgcatgtttttcatgtgcagatccaaatactgcaactcagtcctaccacctgtaaggcgaggtgactgctctagagacttcggggtacatctgccacgtccatagaccgaggagtccctttctatactagcttttaacatttgcccttctgtattttttttccttgttagatattctggagttagacattgtagatatccaaaggcttgtggttccgtgagttttcggttcttgggatagtgtacttgattctgagaatgttgtgttgtatatgccgagcggcattttaactattgttttcattcagttattttggcttttgattatttcttccgcaagtttcgtttatgttcagcatttgttaggcttagctagtcgtagaggactaggtgctgtctcgatggttcacggagggtgaaccggggtcatgacaagttgttatcagagctataggttcataggagtcatggatcacaagccggtctattaaagtttcgctgatcggtacgaaaacatctgtaattatctacgagaggctatgtaactgttaggaaaattccactttatttgatttccttgtcgtgcgatattttgacatcacaattctaaacttnnnnnnnnnnnnnnnnnnnnnnnnnnnnnnnnnnnnnnnnnnnnnnnnnnnnnnnnnnnnnnnnnnnnnnnnnnnnnnnnnnnnnnnnnnnnnnnnnnnnnnnnnnnnnnnnnnnnnnnnnnnnnnnnnnnnnnnnnnnnnnnnnnnnnnnnnnnnnnnnnnnnnnnnnnnnnnnnnnnnnnnnnnnnnnnnnnnnnnnnnnnnnnnnnnnnnnnnnnnnnnnnnnnnnnnnnnnnnnnnnnnnnnnnnnnnnnnnnnnnnnnnnnnnnnnnnnnnnnnnnnnnnnnnnnnnnnnnnnnnnnnnnnnnnnnnnnnnnnnnnnnnnnnnnnnnnnnnnnnnnnnnnnnnnnnnnnnnnnnnnnnnnnnnnnnnnnnnnnnnnnnnnnnnnnnnnnnnnnnnnnnnnnnnnnnnnnnnnnnnnnnnnnnnnnnnnnnnnnnnnnnnnnnnnnnnnnnnnnnnnnnnnnnnnnnnnnnnnnnnnnnnnnnnnnnnnnnnnnnnnnnnnnnnnnnnnnnnnnnnnnnnnnnnnnnnnnnnnnnnnnnnnnnnnnnnnnnnnnnnnnnnnnnnnnnnnnnnnnnnnnnnnnnnnnnnnnnnnnnnnnnnnnnnnnnnnnnnnnnnnnnnnnnnnnnnnnnnnnnnnnnnnnnnnnnnnnnnnnnnnnnnnnnnnnnnnnnnnnnnnnnnnnnnnnnnnnnnnnnnnnnnnnnnnnnnnnnnnnnnnnnnnnnnnnnnnnnnnnnnnnnnnnnnnnnnnnnnnnnnnnnnnnnnnnnnnnnnnnnnnnnnnnnnnnnnnnnnnnnnnnnnnnnnnnnnnnnnnnnnnnnnnnnnnnnnnnnnnnnnnnnnnnnnnnnnnnnnnnnnnnnnnnnnnnnnnnnnnnnnnnnnnnnnnnnnnnnnnnnnnnnnnnnnnnnnnnnnnnnnnnnnnnnnnnnnnnnnnnnnnnnnnnnnnnnnnnnnnnnnnnnnnnnnnnnnnnnnnnnnnnnnnnnnnnnnnnnnnnnnnnnnnnnnnnnnnnnnnnnnnnnnnnnnnnnnnnnngtcttttattctctcatagatggtgaggacacatgctacccgagattatcaggcacccgtgccccctattgcaaccgtcagagaccggggctggggtagaggccgaggacgcgcacgtggtgcagccagagcacttatgcgagctgccgccgaggtaccaccaacagttccagccggagtccaggcacctgacacgcctactgctacaactactccagctcttcaggagactctagcacaattcataagcatgtacaccactatggctcaggcagggttgcttccccttgctgcagctacatctcaggccgggggaggagcacagactcccgccgctcgtacccctgagcagtgagtgcatgttgagcaggtccctgagattattcttgtaccgcttgcagtgccagttcagcccgagggcagggcagcggcttccgaggaggagcaactaaggcttgagaggttcaagaggtacaagcctcttatattcaacggtctagcatcggaggatgctctaggatttctagatgagagttaccgcattctctgtaccatgggtatatccggatcgagcgaggttttcttcactatcttccagcttcaaggagccacttatgagtggtggcgcatttatgagttacacagtctggatgaggctgcttcactgacttagactcagttttcagatctgttcttgagagtgtatgttcctcagagcctcagggacgcatggcgcgcagagtttgagcatttacgccagggtactatgactatctcatattatgcagtctgttacactagtttggctagtcatgcaccagccttggtttctactgttcgcgagagggtttaccggtttattgagggctttattcccatcatcaggttagcatggctcgtgagttggagatggatatttcttatcagcaggtgcgggcattgctaggaggattgagggtatgcatgccagggagagagagagagagaggagagggaggccaagaggtctcgaaagtcgggccatttctctagtgcccgtgccccagctccaggtcgtcattgtaggggttatatgagtcgccctgttctttcagctcttccagtagccagtagtattccagctcctcctagacctcaagagccttattatgcaccatcggtatctagcacgccttctgtgcggggtgctttccggggttagtccaagacctggcccgagctagtcacagccaccacgtcctcccagagcttgttttgagtgtggtgacacacgtcatatggtgagggatttccccagacttgggaggggtgcacctccacagacttcttagccacagtgtgccccacagagttctcaggatatggttacagctccagttaccccacctgctcagccagctagaagtggaggtcggggaggtagaggtcgccctaggggggaggccaggccagatactattcccttcctaccagtaccgaggttgttgcctctgattctgtcatcacaagtattatactggtttgtcatagagatgcatcggttctattcaatctagtctctacttactcttatgtgtcttcttatttgatccgcatttgggtgtatctcgggattctttgagttctcctgtttatgtttctactcctatgggagattctcttattgtggaccacgtttatcggtcgtgtttggtttcttttagtagttttgagaccaaagcctatttattgttactcagcatggttgactttgatattttcttgggcatggactggttgtcgccccattatgctattcttgattgtcacgccaaaaccgtgatgctagctatgccaggcgtaccgcgtgttgagtggaggggtactttagatcacactcccagtagagttatttcttttcttaaagcacagcgtatggttgagaagggtgtgacgcatatttagcttatgtgagagatatcagtattgatacccctttagttgattcagttccagtagaactggattttcccgatgtgtttccagctgacctttcgggcatgctgcctgatagagatattgattttggcattgatctattgccaagcactcagaccatttctattcctccatattgtatggctccttctaagttgaaggagttgaaggatcagttacaggaatttcttgataagggttttattcggcccagtgtatcaccttggggtgctcctatcttgttnnnnnnnnnnnnnnnnnnnnnnnnnnnnnnnnnnnnnnnnnnnnnnnnnnnnnnnnnnnnnnnnnnnnnnnnnnnnnnnnnnnnnnnnnnnnnnnnnnnnnnnnnnnnnnnnnnnnnnnnnnnnnnnnnnnnnnnnnnnnnnnnnnnnnnnnnnnnnnnnnnnnnnnnnnnnnnnnnnnnnnnnnnnnnnnnnnnnnnnnnnnnnnnnnnnnnnnnnnnnnnnnnnnnnnnnnnnnnnnnnnnnnnnnnnnnnnnnnnnnnnnnnnnnnnnnnnnnnnnnnnnnnnnnnnnnnnnnnnnnnnnnnnnnnnnnnnnnnnnnnnnnnnnnnnnnnnnnnnnnnnnnnnnnnnnnnnnnnnnnnnnnnnnnnnnnnnnnnnnnnnnnnnnnnnnnnnnnnnnnnnnnnnnnnnnnnnnnnnnnnnnnnnnnnnnnnnnnnnnnnnnnnnnnnnnnnnnnnnnnnnnnnnnnnnnnnnnnnnnnnnnnnnnnnnnnnnnnnnnnnnnnnnnnnnnnnnnnnnnnnnnnnnnnnnnnnnnnnnnnnnnnnnnnnnnnnnnnnnnnnnnnnnnnnnnnnnnnnnnnnnnnnnnnnnnnnnnnnnnnnnnnnnnnnnnnnnnnnnnnnnnnnnnnnnnnnnnnnnnnnnnnnnnnnnnnnnnnnnnnnnnnnnnnnnnnnnnnnnnnnnnnnnnnnnnnnnnnnnnnnnnnnnnnnnnnnnnnnnnnnnnnnnnnnnnnnnnnnnnnnnnnnnnnnnnnnnnnnnnnnnnnnnnnnnnnnnnnnnnnnnnnnnnnnnnnnnnnnnnnnnnnnnnnnnnnnnnnnnnnnnnnnnnnnnnnnnnnnnnnnnnnnnnnnnnnnnnnnnnnnnnnnnnnnnnnnnnnnnnnnnnnnnnnnnnnnnnnnnnnnnnnnnnnnnnnnnnnnnnnnnnnnnnnnnnnnnnnnnnnnnnnnnnnnnnnnnnnnnnnnnnnnnnnnnnnnnnnnnnnnnnnnnnnnnnnnnnnnnnnnnnnnnnnnnnnnnnnnnnnnnnnnnnnnnnnnnnnnnnnnnnnnnnnnnnnnnnnnnnnnnnnnnnnnnnnnnnnnnnnnnnnnnnnnnnnnnnnnnnnnnnnnnnnnnnnnnnnnnnnnnnnnnnnnnnnnnnnnnnnnnnnnnnnnnnnnnnnnnnnnnnnnnnnnnnnnnnnnnnnnnnnnnnnnnnnnnnnnnnnnnnnnnnnnnnnnnnnnnnnnnnnnnnnnnnnnnnnnnnnnnnnnnnctaaataaggttacagtgaagaactgttatcctttgcctcgtattgatgatctatttgaccagcttcagggctctaagattgatttgcgctcaggttaccatcagttgaagattcgggagccatatatcccgaagactgctttcaggactcggtatggtcattatgagttccttgttatgtcatttgggctgaccaattccccaacagcctttatgcatttgatgcacagtgtgttccggccgtatcttgacttattcatcattgtctttattgatgatattctggtatattcccggagtcgggaagatcatgagcagcacctgagggttgtgcttcagactctaagagagaagaagttatatgctaagttctagaaatgtgagttttggttggattcagttgcattcttaggccatgtggtatcgagtgagggtattcaaatggatccgaagaagatagaggccgtgcagagttgcccagaccatccttagctaccgagatcttcagtttccttggcctggcgggttactaacgttgttttgtggaggcattttcatcaattgcagccctatgaccaggttgacccagaagggtgctccgttccagtggacagaggagtgtgaggcgagctttcaaaagctcaagacagctttgactacagccccattttttatattgcctacaggttcagggtcttatacagtctattgtgatgccttgaggattggcctcagagcggtgttgatataggacggtagggtgattgcctacacgtccagacagttgaagatacatgagaagaactaccctgttcacgaccttgagttagcggccattgttcacaccctgaagatctggcgccattctttatacggtgtgccttgtgagatttatactgatcatcagagcttgcagcacttgttcgagcaaaaggatctaaattcgcaccaaatgaggtggttagagttgctgaaagactatgacatcactattttgtatcacccgggcaaggacaatgtggtggccgatgcttttagtcaccgggcagagagtttggggagtttggcttatttaccagcatcggagaggcctatggcgatggatgttcaagtcttagccagccagtttgtgagattggatctttcggatcccagtcaggttctagcttgcgtagtttctcggtcttccttatttgatcgtatcagggagcagcagtatgatgaccctcatttgcttgtcctcaaggataaggtccagaacagtgatgccagagatatgactattggtgattatagggtattgaggatgcagggtcggatttgtgtacccaatgttgatgggcttcgagagttgcttctagaggaggcccatagctcgcagtatttcattcatccgactgccacgaagatgtatcaggatttgaggcagcattactggtggagatggatgaagaaagatatagttggatttgtagctcggtgcctcaactgttagtaggtgaagtgtgatctccaaagacctggtgggttacttcagcagatagagatttcggagtggaagtgagagcggatcaccatggactttgtagttgggctcccacggactttgagaaagttcgatgctatttgggtgatttatggatcggctgatcaagtccgctcactttattcctatgtgtactacttattcctcagagcggttggcagagatctatattcgggagattgttcgtctacatggtattctagtgttcatcattttagatagaggtactcagttcacattacggttctggagggccgttcagcatgagttgggtactcgggtagagttgattacaacatttcaacctcagacggatggacagtccgagcacactattcagattcttgcggatatgctctgtgcgtgtgtgattgagtttggagggtcttgggattaattcttgccattggcggagttttcttacaacaacagctattagtccagcatttcagatagcactgtatgatgttttatatggtagacggtgtagatccccggtgggttggcttgagccaggtgaggccaaattattgggcacagacttggttcaggatgctttggagaagttcaaggtgattcaagatagactacgtacagcctagtctagacagaagagttacacggacgaaaggttcgtgatgtttcttatatggttagagagcgagttctgcttcgagtttcgcctatgaagggcattatgagatttgggaagaaaggaaagttgagtccaaggtttattggcccttttgagatattgaggcatgttggggaggttgcttatgagcttgctatacctcccagctttgcaggaattcatctggtatttcatgtttcgatactctagaggtatcacggtaatctgtcgcatgtgttgaattttagttcagtccagttggacaaggatctatcctatgttgaggagccaatggcaatattggataggaaggttagaaaggtgaggtcaaagaatattgcatccgtgaacgttcagtggcggggtcagccggtcgaggaggcgacctgggagaccaggcaggatatgcgcagccgttaccctcaccttttcactacttcaaatatgtctctatgctcgttcgaggacgaacgaatgttttagtgtagaaggatgtgacaacccggtcggtcgttttaagaatttatgccccgatgccccgatcccccatagaacagctgaaacctgcaatttttccaagtctaattctactctatggcctatccaaatctcacccgagtcctcgggactccaatccaaacatgtccaccaacctaaaaacatcatacggacttgctagtgcattcaaattactcaaataacaacaacaactatgaatttagcatcaaaatcatgaaatttcttaagaacaacaaattttccaatttcctcaaataaggtccgattcatatcatttcaagtctgtttcttaccaaattttacagactcgacttaaaccacatataagacatgtaccgggctccagaaccataacacgggcccgatagcatcaaattttaaacacatttcatttccaaaacctataaataatttcagaaaacaattttctttaaaaattcatttcttaggcttgggacctcggaattcgattccaggcatacacccaagtaaatatttttctacggaccctctggaaccgtcaaatcacgggccagggtccgttcacccaaaatgttgaccgaagtcaacttaaattcattttaaagtcaaaattcattatttttcacatattttaacatattggctttctcgccacgcgtccgaactgcgcacgcaaattgaggtgatgcagaaagatgtttttaaggccttggaatacaaaatttacttttaaaacaagtgatgatcttttgggtcatcacatagcataatagtagctacacacgaactctcgtcacctagtgcgtatgtagcccccgcatttagtggcaaattatttgataatatcacctatggggacaattccctcttacaaggttagataggagactcgcctcgctccaagcgtacttccaatatcaagaacgagctcaaactctcaatttggagccgaacgatccaaaactagataaacgaggtaggaactagtcaatacaagcttacaagatcgcattctaacgatttaagcaatttcacaaccttaaacacaagtttcctaaaatctgaccccgggtccacgtgcccggattccgaaatttttcgaagaaagttgttctttataacctaaggaccaataatatatgatttctaatgcatttcataacaaacttcatggttaaatctaacttttatcaaaatcctaggttttgctctaactccatgattttaccttaatctttgtgtgttaatctacccaagactcaagtattaagctagaaataagtagggtaaacttacctcaagatgctaggtgaaggtcctctctcaagagctccaaaatcgcccaatgggtgagtgaaaaatnnnnnnnnnnnnnnnnnnnnnnnnnnnnnnnnnnnnnnnnnnnnnnnnnnnnnnnnnnnnnnnnnnnnnnnnnnnnnnnnnnnnnnnnnnnnnnnnnnnnnnnnnnnnnnnnnnnnnnnnnnnnnnnnnnnnnnnnnnnnnnnnnnnnnnnnnnnnnnnnnnnnnnnnnnnnnnnnnnnnnnnnnnnnnnnnnnnnnnnnnnnnnnnnnnnnnnnnnnnnnnnnnnnnnnnnnnnnnnnnnnnnnnnnnnnnnnnnnnnnnnnnnnnnnnnnnnnnnnnnnnnnnnnnnnnnnnnnnnnnnnnnnnnnnnnnnnnnnnnnnnnnnnnnnnnnnnnnnnnnnnnnnnnnnnnnnnnnnnnnnnnnnnnnnnnnnnnnnnnnnnnnnnnnnnnnnnnnnnnnnnnnnnnnnnnnnnnnnnnnnnnnnnnnnnnnnnnnnnnnnnnnnnnnnnnnnnnnnnnnnnnnnnnnnnnnnnnnnnnnnnnnnnnnnnnnnnnnnnnnnnnnnnnnnnnnnnnnnnnnnnnnnnnnnnnnnnnnnnnnnnnnnnnnnnnnnnnnnnnnnnnnnnnnnnnnnnnnnnnnnnnnnnnnnnnnnnnnnnnnnnnnnnnnnnnnnnnnnnnnnnnnnnnnnnnnnnnnnnnnnnnnnnnnnnnnnnnnnnnnnnnnnnnnnnnnnnnnnnnnnnnnnnnnnnnnnnnnnnnnnnnnnnnnnnnnnnnnnnnnnnnnnnnnnnnnnnnnnnnnnnnnnnnnnctacttcagtgatttctgcatctgcggtcctgctactatgagaggatcgccggatctgtggaattggccaagtgggctaggaccgctcctatggacttgaagccaattctacgcagctgcttctgcaattttgggcctggcctgccttggccgcatctgtgagagaatgaccgcttctgcggtctcgcacctgcggctgaccaatcgcaggtgcggttatgacagcaacctgaagcttcaactcttcttaaattttccaacttcactcgagcctcgtccgattgacgctcggggatcccgggccctgcccaaacataccgacaaatttgaaatcatgaaacggacccgctcgaatctccggaacgcccgtaacaacgctaaatctaagaatcaccccttaaaaccaattggatcaaacttatgaacttcaagttcttcaattcacttctaacgtgccgaaacgtacttatactactcggattgacaccaaattttgcgggcaagtcttaaatgttatattggacctatactaggctctggaaccaacatacgagcctgataccaatgtgatcaatcattatttagtttttttaaatccttagaattttagtttaataatttctaataaaaattcattactcgggctagggaccttagaatttgattccgagcatacgcccatgtcccatattttcctatggaccgtccaggaccgccaaaatacgaatctgggtccgtttactaaaaatgttgaccaaggtcaaacttagccttttaagaaaatattaaggaatcaaatgagcatattccaacccaaactcttccaagtcccgaaccaaccatccccacaagtcgtaaattagttaaagcaagtacgagaagtttcatttaggggaacggggttctaaaaagcaaaacgaccagttgggtcgttacattctccacctcttaaacaaacgttcgtcctcgaacggacatagaaaagtacctgaggtgctgaataaatgtggatatctgctctacacgtccttctcggactcccaggttgcctcctcgactgttggcccttccactggaccttcaccgctgaaatcctcttggatcttaactggctatcctgcctatcagtaatggcaactggctcctcctcataactcatactctcatctagctgaatagtactgaagtctaacacatgggacaagtcggcatgatacctccgaagcatagacaagtgaaaaactgaatgaactcccaataagctgggggtaaagcaagctcgtaagcaacctccccaactcacatcaacacctcaaatgggccaataaaccttgggctcagcttgaccttcttcccgaacctcataacacccttcattggcgatactttcaagaggaccttctcacaaaccatgaatgatacatcacgcgccttctgatccacgtaactcttctgtttggactgagctgtgcgaagcctctcctgaatcaactttaccttgtccaaggcatcttgcaccaaatctttaccgtatatttagcctcaccaggctcaaaccacccaataggagaacgacaccgccgaccatataaagcctcaaatagagccatctcgatgctggactggtggctgttgttgtaagcaaactctgccaaaggcaagaactgatcccactatcctccaaagtcaatcacacatgctctaagcatgtactccaaaatttgaactgttcgctccgattgatcgtcggtctgaggatggaatgttgtgctaagctctatatgggtccccaactcactctgaatggctctccaaaaatgggaagtgaactgagggccaatatctaatacgatggaaacaggcactccgtgcaacctgactatctcccgaatgtaaatctgaggcaatctctctgaagtgtaagtagtcataaccggaataaagtgcaccgatttggtcaacctgtcaacaatgacccatactacatcaaacttccgcaaagtctggggcaacccaactacgaagtccatagtaatgtgctcccacttccattgtggtataggcatctgctgaagtaggccacccggcctctagtgctcatacttaacctgctggcaattcaaacacttagccacatactccattgtgtccttcttcatcctccgccaccaataatgttgtctcaagtcatgatacatcttcgtctcactcggatgaatggaataccatgaactgtgtgcctcctctagtatcctctccatcagaccatcaacattaggaacacataagtgaccctggagtcgcaaaacaccatcctcaccaatagaaaactctttggcactaccctgaagcattgtctctctgagaaccgccaaatgaggatcatcgaactgtcgggccttgatctgccccaataatgaagactgaccaacaacacacgcaagaactcggttgggctctgaaatatccaacctcacaagtctattagccaaggactgaatgtccaaagctagtggcctctcctctgctgnnnnnnnnnnnnnnnnnnnnnnnnnnnnnnnnnnnnnnnnnnnnnnnnnnnnnnnnnnnnnnnnnnnnnnnnnnnnnnnnnnnnnnnnnnnnnnnnnnnnnnnnnnnnnnnnnnnnnnnnnnnnnnnnnnnnnnnnnnnnnnnnnnnnnnnnnnnnnnnnnnnnnnnnnnnnnnnnnnnnnnnnnnnnnnnnnnnnnnnnnnnnnnnnnnnnnnnnnnnnnnnnnnnnnnnnnnnnnnnnnnnnnnnnnnnnnnnnnnnnnnnnnnnnnnnnnnnnnnnnnnnnnnnnnnnnnnnnnnnnnnnnnnnnnnnnnnnnnnnnnnnnnnnnnnnnnnnnnnnnnnnnnnnnnnnnnnnnnnnnnnnnnnnnnnnnnnnnnnnnnnnnnnnnnnnnnnnnnnnnnnnnnnnnnnnnnnnnnnnnnnnnnnnnnnnnnnnnnnnnnnnnnnnnnnnnnnnnnnnnnnnnnnnnnnnnnnnnnnnnnnnnnnnnnnnnnnnnnnnnnnnnnnnnnnnnnnnnnnnnnnnnnnnnnnnnnnnnnnnnnnnnnnnnnnnnnnnnnnnnnnnnnnnnnnnnnnnnnnnnnnnnnnnnnnnnnnnnnnnnnnnnnnnnnnnnnnnnnnnnnnnnnnnnnnnnnnnnnnnnnnnnnnnnnnnnnnnnnnnnnnnnnnnnnnnnnnnnnnnnnnnnnnnnnnnnnnnnnnnnnnnnnnnnnnnnnnnnnnnnnnnnnnnnnnnnnnnnnnnnnnnnnnnnnnnnnnnnnnnnnnnnnnnnnnnnnnnnnnnnnnnnnnnnnnnnnnnnnnnnnnnnnnnnnnnnnnnnnnnnnnnnnnnnnnnnnnnnnnnnnnnnnnnnnnnnnnnnnnnnnnnnnnnnnnnnnnnnnnnnnnnnnnnnnnnnnnnnnnnnnnnnnnnnnnnnnnnnnnnnnnnnnnnnnnnnnnnnnnnnnnnnnnnnnnnnnnnnnnnnnnnnnnnnnnnnnnnnnnnnnnnnnnnnnnnnnnnnnnnnnnnnnnnnnnnnnnnnnnnnnnnnnnnnnnnnnnnnnnnnnnnnnnnnnnnnnnnnnnnnnnnnnnnnnnnnnnnnnnnnnnnnnnnnnnnnnnnnnnnnnnnnnnnnnnnnnnnnnnnnnnnnnnnnnnnnnnnnnnnnacttaaggcaaacgcgaccacattttccttgcccggatgataaagaatggtgatgtcataatccttcagtaactcaagccatctatgctgcctcaaattgagatccctctgctagaataaatgctgtaagccgcgatgatcagtataaacctcatatgacaccccatatagataatgcctctatatcttaagagcatgaacaatcgcggccaacttcaaatcgtgcacaagataattcttctcatggatctttagcttacgtgaagatatgcaataacttgcccttcctgcatcaatacacatcccaatccaacacctgaagagtcgcaatatgccgtatacatccctgaaccggaaggcaacacaagaactggtgtcgtagtcaaagctgtcttgagctcctgaaagctcgcctcataatcatcataccaacggaaaggagcaccctcctgggtcaatctagtcagaggtgatggaatagatgaaaagccatgcacaaatcatctgtaatatcctgttaaccataggaaactcctgatctcggtcactgaagtaggatgtggccaactctaaactgcctcaatatttttgggatccaccttaataccctctcctgacacaacatgcccaaagaatgccactgactctagccaaaaactcacacttggagaacttagcatatagcttttgctctcgcaaggtctggagcactactctcaaatgttactcgtgctcctccaagctacgtgagtatatcaagatgtcgtcaatgaagacgatgacaaaggaatcaatataaggtttgaacaccctgttcatcaagtccataaatgttgttggggcattagtcaagccaaaggacatcaccagaaactcataatagttatatctagtccgaaatgcagtcttcagaatatccgagtcccagatcttcaactgatggtacctgacctcaagtcgatcttagagaacacctaagcaccctgaaactgttcaaacaaatcgtcgatacgaggcaatggatatttgttcttgatagtgactttgttcaactggcggtaatcaatgcgcatccgcatagtctcatccttcatcttcacaaataacactggtgcacccaaggtgatacactaggtcaaacaaaccccttaactaacgactcctcaagcttctctttcaactccttcggaaccatacggtatggtgggatggatataggttgggtgcctggagccaaatcaatacaaaaatcaatatcacgatctggtggcatgccaggaagattagaaggaaacacatcggcaatatcccgaactactgggactaaatcaatcgttggagactctgcggtggtatcccgaacataatccaaataagccaaacaccccttctcgaccatatgacaagccttcaggaaagagataacccgactagacatatcaactgtggaacccttccactccaaccttggcaaccctagcattgataatgtaacagttttggcatggcaatctaggacggcgtgatatggagataaccaatccatgcccaggatgatcgatcatataaagcaacaggagatccgctctagtctcaaaaccacagaatgtgactacacaagaccgatagatccgattcacaaccatagaactacccacaggagtggacacatgaacgggagtgctcaaaggcgcaggaggaataactaggaaatgagcaaacagagatgatacatatgaataggtggaccctggatcaaataataccgaagcatctctaccgcagacgaaaataatacctgtgttgacagtatctgaggctaatacatctggcctagccggaagggcatagaatctggctggagcgccgactggctagcctccacctgactgagcagtagctggctgacctcactctgcctggcccccacctctaggatggcctctacccgtctgtcccccgcctctgggaggctgagcaaccggtgctgaaattataggctgctgaccctactgtactaccttgccccaaagtttggggcaggtcctcttcatgtgactcggatctccacactcgtagtaacccctcggcaccatagcctgttgccttgaagtctgagcctactgagccgaatatccactagaagaactctgaatggctggtgggcgatatgaactctctggcatggcattgaagtaagcactggaagaaccctgatgactagaatacccggtggaggaaccctgaatagctggtggacggtaaggactctccggtatcgcactaaaataaggtctcactagagaacctcggggaggtggtggtggtgctgaatacgggggtatgctgggctgacccctcccggagtgccccctacccctagctggggaacctctaaactctctagaaaatcggtccctcttctcctactgaaactgctctctacccctctggcgataaccctcaatcctacgagcaatctctaccactagctgatactcagtacccatctccacctctcgggccatgctagctcgaataccgaggtgcaaccccgcaacaaacctccgcactctctctgaatctgtgggaagtatcatgagagcatggcgagacaactcagaatatctcgcctcatagtcggtcacggacatctgactctgttcaagatgctcaaactgataccgcagctcttccctctcaaagggtgaaatatccctatccaaaaataactgtgtgaactgaccctaagtgaggggaggagaacctgctggcctgccaagaacataagactgccaccatctgcgggccctgccctccagctgaaaagtagtgaagtctaccccatacgactccaatatcctcatgttgtgcagtttgtccctacacctatcaatgaaatcctaggaaacctcatgacgctcacccccgaagacaggatggtgaagtctagtccatctatccaataacttctgcgggtcaccatccgcagctagtctgggctcgggcactactacagcaactggctgagcctcatccgcaggtagtgcacccgaagtctgatacattgcagctgtgtggctaggagcctgagtagtagggcatgttctccccctcctgcctatgatataggtggatctactggaaataaactagcctgagtcatggtgtccatgaacagcagcatacggccaatgatctcttggaaacccggtgctatcataaagtccaccggggtaggctctgctgcgggcacctcgccctgctcctcaatgataggatctcctgtaggatctgctagtggtgctaccgagacagctttggtacgccctcgtcccctaccttgagccggtgctctcccccggcctctgccttgacctctagcaacggagggagcagctcctcccgggtctaaaaaattagtcgtacgtgtcctcaccatctgtgagagaatagaagagggaaatttagtataccaaccactgcacgataggaaataggtaaagagtagttttcctaacaccctatagactctcgaagatgaatacatacgtctttgtaccgatccgcaagactctattaggttttcccatgacttgtgagacctacatgaacctagtgctctgataccatgttgtcannnnnnnnnnnnnnnnnnnnnnnnnnnnnnnnnnnnnnnnnnnnnnnnnnnnnnnnnnnnnnnnnnnnnnnnnnnnnnnnnnnnnnnnnnnnnnnnnnnnnnnnnnnnnnnnnnnnnnnnnnnnnnnnnnnnnnnnnnnnnnnnnnnnnnnnnnnnnnnnnnnnnnnnnnnnnnnnnnnnnnnnnnnnnnnnnnnnnnnnnnnnnnnnnnnnnnnnnnnnnnnnnnnnnnnnnnnnnnnnnnnnnnnnnnnnnnnnnnnnnnnnnnnnnnnnnnnnnnnnnnnnnnnnnnnnnnnnnnnnnnnnnnnnnnnnnnnnnnnnnnnnnnnnnnnnnnnnnnnnnnnnnnnnnnnnnnnnnnnnnnnnnnnnnnnnnnnnnnnnnnnnnnnnnnnnnnnnnnnnnnnnnnnnnnnnnnnnnnnnnnnnnnnnnnnnnnnnnnnnnnnnnnnnnnnnnnnnnnnnnnnnnnnnncgacccaattctactatagttcatgatggctcccaacacccttgtcaggcaagccaacgcggaagtgttaacaagtcctcattttctctttactaaaacaagtacagaagttttctaaatttgcagttaaaaagcatgtgataattaacaatgtacaataatagttatacaattcccaaaagaatagtctactaatgtgtgtgccaaaacctggtgtcacaagtttacgggcaactagtagaatatacaaaagaataaatctatcctactgtctgaaatagaatagacaaccaaaataannnnnnnnnnnnnnnnnnnnnnnnnnnnnnnnnnnnnnnnnnnnnnnnnnnnnnnnnnnnnnnnnnnnggagactccatcatgctgctgaatggcacaggaagggagcagctcactatgaaaatctcggacacggatcaagaatgcgcaccggactggtaaccagatgtacctacctcagatcctgtacaattaagtacaaaagtgtagtatgagtacataaacaatatgaacccagtaagtatcctgtctaatatcgaagaagtagagacgagaggtcgacttgacacttactaaggtcaaataatatgagaaatgaattatactgagcatggatataataaataattagcagtttatagcaagaaataacaggtcctctcctagataatatcaaagttgtccactttcattccagggcaaataataaagctcaattcatagaaaaatactgagtaaagcatgcgcaagtagtgtcgaggacgtacggcccgatccaacgtaaaagtaaattgtgcactgccgagggtcgaatggcgcaaaccatagatgtatctattaccccgctcgcgaatcaaacatgcgacgcggtcaaatgtaattaaaaacaacaacaagcagataggaatatataaccgaggagcaattactcatagaaatatcaacttctctttaaaaaggccaagaaagataatgttcctcttactagtctcatttaccataatcaccatgatttaaacaatccaaattaaacataaagtttcaagaataacacataaagcatatttttgggtcctagattactcagacttagcataatagtagctacacacggactttcgtcacctagtgcgtacgtagcccccgcatttaatggcaaattatttgattatatcacctacggggacaattccctcttacaaggttagataggagactcaactcgctccaagcgtacttccaatatcaagaacgagctcaaaccctcaatttggagccgaacgatccaaaactagataaatgaggtaggaactagtcaatacaagctcaaaagattgcattctaactatttaagcaattttccaaccttaaacacaagtttcctaaaattcaaccccgggcccacgttcccggatttcaaaatttttcgaagaaagttgttctttataacctaacgattaataatatatgatttcaaacgcatttcataacaaaattcgttgttaaatctaatttttatcaaaaccctaggttttgctctaaccccataattttaccttaatctttgtgtgttaatctacctaagactcaagtattaaactagaaataagtagtgtaaacttacctgaagatgctaggtgaaggtcctctctcaagagctcaaaaatagcccaatgggtgagtaaaaatggccaaaatgacttagagcccgtaataaatgaagctcactgcttcagtgattttcacatctgcggtcccgcttctgcgagaggaaggccgcatctacggaattggccaagtgggctgggaccgctcctgcggtcttgaagccgcttctgcgattttgggcctggcctgccttggtcgcatttgcgagagaacgaccgcttctgcggtctcgcacctgcggctaaccaaccgcaggtacggttatgacagcaacatgaagctttagctcttctcaaattttccaacttcactcgagcctcgtccgattgacgctcggggctcccgggccctgcccgaacataccgacaagtttgaaatcatgaaacagacccgcgtgaacctccttaacacccgaaaaaacactaaatctaagaatcaccccttaaaaccaattggatcaaacttatgaacttcaagttcttcaattcacttctaacgtgccgaaacgtacttannnnnnnnnnnnnnnnnnnnnnnnnnnnnnnnnnnnnnnnnnnnnnnnnnnnnnnnnnnnnnnnntactattcggattgacaccaaattttgcaggcaagtcttaaatgtattggacttgtactgggctctggaaccaatatacgatcccgataccaatgtgatcaatcattatttagtttctttaaatccttagaatttcagtttaacaatttctaataaaaattcattactcaggctagggannnnnnnnnnnnnnnnnnnnnnnnnnnnnnnnnnnnnnnnnnnnnnnnnnnnnnnnnnnnnnnnnnnnnnnnnnnnnnnatcgaaattcgattccgggcatacgcccaggtcccatattttcctccggaccctccggggccgccaaaacacgtattcgggttcgtttgctaaaaatgttgatcaaggtcaaacttagccttttaagaaaatcttaaggaatcaaatgagcctattccaacccaaactcttctaaatcacgaaccaaccattcccacaggtcgtaaattagttaaagcaagcgcaagaagtttcatttaggggaacgtgattttaaaaagcaaaacaactagtcgggtcgttataattacatgatcattggcatgacacattggtatctttttgaactcccgtaagttttactattctatcatctgtgtatgagttttaaaaatacgtaagttggttaaagttgcatttaactaggggcgtcactgctctatcgaaaacaaggggtgtcactgttgtttcgagaagatgctgannnnnnnnnnnnnnnnnnnnnnnnnnnnnnnnnnnnnnnnnnnnnnnnnnnnnnnnnnnnnnnnnnnctttttggtttatatattgcatataactaatattagatttttcctgaaccatcccaattttcttggttttatggcattatctgttagattcagttaacttgaagtacttaagttttaaaaaagacgcataagaatatttactaagatgcctcattgtcatgtaaaataaaaaaaaattaacttaacaagaaaaattataaaactctcactacattttgcattgccgattaaaaaaaagtcttctctattaaaccaagaaaactagtactaagtgattacttattaaaaaataaaaaagaactagtaagtgatattgctcaaaagtttgaaatgattctattcttataagtattaaggttgcctatatttctaattcccaatatgtcctactaccatattatttatatatgagtctcacataaaggtgtctaacgggccggatcagcccgattccggaccgtctcagaccggtgaaaaccggaaccggcccggaccggtagaagggggccgggtgaggctgggttataggagtaaggcagtttgtaccgttcacttttgaaccaccggttaaccggaccggtcaaacccggtcaatgaacaatactgttcatctggttaaccggcccggcccagaccgacccagaccgatttaacggtaacaatttcttttttaagcttgggcctcagattctgaccgttggcaatggtccatttcacaatatggtcgttgcccaatggctaaaattgacatttagcccaatttttgggtttttttaaaaaaaaattaaccccctttgaaaaactataaatacaccccatcttcctcatttctttactcatctctcaattctcaatctcaagttaaatcatgcctcgtacttctagagtgcgctcatatgttttgaaacactttgaggtggtagaagaaaatgaagaagttcagaaagtaaagtgcaagaattgtggtcaagtcttaaatcttcgttcaaaatctggcacagacagtttaaggaggcatataaagaattgtcttgagcgtcctccgaaaattcgtatttaagttgatttgagacaatttgtgttattttaaaattatnnnnnnnnnnnnnnnnnnnnnnnnnnnnnnnnnnnnnnnnnnnnnnnnnnnnnnnnnnnnnnnnnnnnnnnnnnnnnnnnnnnnnnnnnnnnnnnnnnnnnnnnnnnnnnnnnnnnnnnnnnnnnnnnnnnnnnnnnnnnnnnnnnnnnnnnnnnnnnnnnnnnnnnnnnnnnnnnnnnnnnnnnnnnnnnnnnnnnnnnnnnnnnnnnnnnnnnnnnnnnnnnnnnnnnnnnnnnnnnnnnnnnnnnnnnnnnnnnnnnnnnnnnnnnnnnnnnnnnnnnnnnnnnnnnnnnnnnnnnnnnnnnnnnnnnnnnnnnnnnnnnnnnnnnnnnnnnnnnnnnnnnnnnnnnnnnnnnnnnnnnnnnnnnnnnnnnnnnnnnnnnnnnnnnnnnnnnnnnnnnnnnnnnnnnnnnnnnnnnnnnnnnnnnnnnnnnnnnnnnnnnnnnnnnnnnnnnnnnnnnnnnnnnnnnnnnnnnnnnnnnnnnnnnnnnnnnnnnnnnnnnnnnnnnnnnnnnnnnnnnnnnnnnnnnnnnnnnnnnnnnnnnnnnnnnnnnnnnnnnnnnnnnnnnnnnnnnnnnnnnnnnnnnnnnnnnnnnnnnnnnnnnnnnnnnnnnnnnnnnnnnnnnnnnnnnnnnnnnnnnnnnnnnnnnnnnnnnnnnnnnnnnnnnnnnnnnnnnnnnnnnnnnnnnnnnnnnnnnnnnnnnnnnnnnnnnnnnnnnnnnnnnnnnnnnnnnnnnnnnnnnnnnnnnnnnnnnnnnnnnnnnnnnnnnnnnnnnnnnnnnnnnnnnnnnnnnnnnnnnnnnnnnnnnnnnnnnnnnnnnnnnnnnnnnnnnnnnnnnnnnnnnnnnnnnnnnnnnnnnnnnnnnnnnnnnnnnnnnnnnnnnnnnnnnnnnnnnnnnnnnnnnnnnnnnnnnnnnnnnnnnnnnnnnnnnnnnnnnnnnnnnnnnnnnnnnnnnnnnnnnnnnnnnnnnnnnnnnnnnnnnnnnnnnnnnnnnnnnnnnnnnnnnnnnnnnnnnnnnnnnnnnnnnnnnnnnnnnnnnnnnnnnnnnnnnnnnnnnnnnnnnnnnnnnnnnnnnnnnnnnnnnnnnnnnnnnnnnnnnnnnnnnnnnnnnnnnnnnnnnnnnnnnnnnnnnnnnnnnnnnnnnnnnnnnnnnnnnnnnnnnnnnnnnnnnnnnnnnnnnnnnnnnnnnnnnnnnnnnnnnnnnnnnnnnnnnnnnnnnnnnnnnnnnnnnnnnnnnnnnnnnnnnnnnnnnnnnnnnnnnnnnnnnnnnnnnnnnnnnnnnnnnnnnnnnnnnnnnnnnnnnnnnnnnnnnnnnnnnnnnnnnnnnnnnnnnnnnnnnnnnnnnnnnnnnnnnnnnnnnnnnnnnnnattatattctttatatttttactttatattaatatagcttacaataattatacaaaaattcaaaatacaaaaaaaaagtaaaaataacaataacccggtccggcccggccccatgaacctgtaacccttacggttcaatttttacctggatgaaccccaacccattaaatccggtatgccccaacccataaccgatctgaaccataacccgtacgggtactaaattcccctacccagcccggcccggcccacccattaaacacctatagtctcataacattacaagagatcgtattgacttacttcactatgcatgtgcatttacccatgactcatatgacgttatatatgcaccaccacctgatcagctggtatacgttgatgattctgcccacaatggcactagatggcgttatatacgtatatatatatcatatcatcttggccactgtgggcaaatcatcaacgtataccaactgatatatatatataggatatgggaaaaggttatgacgttatatacgcaccaccacctgatcagctggtatacgttgatgatttgcccatagtgaccgagatgatatgatgggatgccctcagaggcttgatgattttatgtacgtacagacctatgcattatatgacatttatatgcatgccattataaatattttatgatttacaaagctatccagacttacaagtatagataatcggtttggcgagccctcatagtagacgagattggcattcagcgaaggattggtaagacttcacctcattcagagtgcaggcgagtctataagtcatcgtgtcagagtttttgtacagacttatgggtaggtcggtaccctgtcccattttatgtcaaataatcttagaggctttgtagacagaggttcagttggtacagtatgtcagaggccttgacgggcccatatgtattcatgttttaataaatatgattcagtgatacagtgttgcccacttatagttatgcattacgagttgtagctatgttggcccatgatagttataaaaggaatgaaaaagttacagagtgattcgctcgggccaatgcgacaccaggtgccagccacgcctcccaaggttggggcgtgacaatttctttcattaattaaattttgttgttccttcatataaataaatgtttaaaccatcacatataattattaacgtgcaacgcagttcatagatactagtaataaataaatgtagatagtcgtttatgtttttttttgttgctcaacctcgatatatttgatatattcattttttctgcttgggactaattcatcgatatggagtatcatataaaacacaaaacttcaagactaatgtggaatcaaaagagctcacatgcactaagcgaaataataatataattatagacttgcatggtcgatattgtcaaccagcttaattaagacagagatgcaattattgcttttattttatggtgatttttggaactccaagaatcaaaagaagacttattaaagaatgacagtctctcttttgtgctaaaattttacattgtttgcaacaacaaaaaaaaaaggaaaaaaagaagatggctgatgtagcagtgaattttctggtagagaatttgatgcagttgttgagggacaatacagagctaatatttggagtgaaaggtgaggcagagaatctgcttcaagatttgagtgagttcaatgcgtttctgaagcaagcagacaagtcccgcagcgataacgaagttctaaaagaattggtgaagagtatcagaaaagtgacgaatgattctgaagacgctattgataagtttgtaattgaggcaaagcttcacaaggacaaaggggtaggcaggtttgtggacattgcgcattataaaagagtgaaagatgtagcccttgagattaaaggtatcagagatagggtgaaagaaatccgtctgaacaatgcacatggccttcaagctcttcaagatgatgatccatccaacagaggcgtggaagacagaaaggtacctatattatatatgccttcaatcattcattttttgcccttaatttgcgccgaacccgctcggaacactttagctccgcccctgcctgccatgtttgttgttggtatcatgtaaaattttagcatgtaactcaacaccacaagtcaatgagacaacgaatgcagtaacccagctagggctatgcatcagtcgggtcggatcggatcagatcgaatttaacacatttcgaattgtaaattcggattccgatttttataaaatgcaatccgaatccaatccaaattaaattggatcggattggattttaaagtttgaatcgggtaaatatttcggattttcgaatcagatagtatgccttattaaggctactaacaatctaatcggctactacactttataaggcttaaattgaaaggcaacaaatgtcttttatagcaatagacaaaacaaagctccatagcaaaataaaataaactaaaattccaaacaaatgttatctcggctgggaatcaagccccaactcagagctgtgggccaggttgctttgctttatcggatcaatcagtatgcggtgggcaagctctttcccaagtcgctgagctgtttaacagagggaaggaaaaagaaatgacaaaacaaaaactacaaaggaaaaagaatcgaatctcgctcattttcaggtaagatttacttagctcgctccttgctcgcgaagcggcataccaataaaaagaaaagcgttatcggatttccatcgtcgttgtccgtcgataggaaggagatactgagaatgagagacacaaagataagacttaagagaagcgaactaacaagtgaggcttgctcagttgataaaagcacctctacccacgaccgttaggtcctgggttcgagtcatgctggaggagaagggtggaaacactatagatcctcctaaattgggagggatattaaaaaaaaaaaaaaaaaaaagagaagcgaaaagagcannnnnnnnnnnnnnnnnnnnnnnnnnnnnnnnnnnnnnnnnnnnnnnnnnnnnnnnnnnnnnnnnnnnnnnnnnnnnnnnnnnnnnnnnnnnnnnnnnnnnnnnnnnnnnnnnnnnnnnnnnnnnnnnnnnnnnnnnnnnnnnnnnnnnnnnnnnnnnnnnnnnnnnnnnnnnnnnnnnnnnnnnnnnnnnnnnnnnnnnnnnnnnnnnnnnnnnnnnnnnnnnnnnnnnnnnnnnnnnnnnnnnnnnnnnnnnnnnnnnnnnnnnnnnnnnnnnnnnnnnnnnnnnnnnnnnnnnnnnnnnnnnnnnnnnnnnnnnnnnnnnnnnnnnnnnnnnnnnnnnnnnnnnnnnnnnnnnnnnnnnnnnnnnnnnnnnnnnnnnnnnnnnnnnnnnnnnnnnnnnnnnnnnnnnnnnnnnnnnnnnnnnnnnnnnnnnnnnnnnnnnnnnnnnnnnnnnnnnnnnnnnnnnnnnnnnnnnnnnnnnnnnnnnnnnnnnnnnnnnnnnnnnnnnnnnnnnnnnnnnnnnnnnnnnnnnnnnnnnnnnnnnnnnnnnnnnnnnnnnnnnnnnnnnnnnnnnnnnnnnnnnnnnnnnnnnnnnnnnnnnnnnnnnnnnnnnnnnnnnnnnnnnnnnnnnnnnnnnnnnnnnnnnnnnnnnnnnnnnnnnnnnnnnnnnnnnnnnnnnnnnnnnnnnnnnnnnnnnnnnnnnnnnnnnnnnnnnnnnnnnnnnnnnnnnnnnnnnnnnnnnnnnnnnnnnnnnnnnnnnnnnnnnnnnnnnnnnnnnnnnnnnnnnnnnnnnnnnnnnnnnnnnnnnnnnnnnnnnnnnnnnnnnnnnnnnnnnnnnnnnnnnnnnnnnnnnnnnnnnnnnnnnnnnnnnnnnnnnnnnnnnnnnnnnnnnnnnnnnnnnnnnnnnnnnnnnnnnnnnnnnnnnnnnnnnnnnnnnnnnnnnnnnnnnnnnnnnnnnnnnnnnnnnnnnnnnnnnnnnnnnnnnnnnnnnnnnnnnnnnnnnnnnnnnnnnnnnnnnnnnnnnnnnnnnnnnnnnnnnnnnnnnnnnnnnnnnnnnnnnnnnnnnnnnnnnnnnnnnnnnnnnnnnnnnnnnnnnnnnnnnnnnnnnnnnnnnnnnnnnnnnnnnnnnnnnnnnnnnnnnagagagagacttcgatataaactaagaaaaaataagtctaaagagagtggatgggttcggattctcggatatccgatccaaatgcacagccctaaacccagcattgcatttatatatatatatatatatatatatatatatatatatatatatttaacaggtttagactccttaataagaatgaaggtgagtaagattagatgacaatatgctgcttaaatataaccaattcagatgtctccattgagcctccagcagaatataatggtacaatcaacggaactgtattgcacttaaatatactttgcacaggaagatactcctgcgcaaagttcatagaatgattatcaattttatatgagaagccgacataatcaacaaaatgagtatcgtaaaaatgtgaaagtaagaaggatgtgtggcatttcttggacaatatctatattgttgtaatgttagtgttctatatatgtcttgggaaaatccacctttgcttctatttactactgagtatcaatttttccaatacaaaacaaagctaatcacctatcttttaattaagctgcacaaatgcgtacgtaatacaatatgttttggttgaatataatgtttcttttcttgccaatgaacgttaacttcatatatatgtctaatcttcatctttgatattaatttaaaagcctcccgtggttgaggaagatgatgtggtgggctttgatgaggaggcacagaaggtaatcgaccgtcttcttgacagatcagatgaattagaggttattccagttgtaggaatgcctggtcttggcaaaaccacactagcaactaagattttcaagcatcggaaggttgaatacgagttctttactcgagtttgggtttatgtctcgcaatcatacaagacaagagaattatatctcaacatcattagcaaattcaccggaaaaacaaaacaataccaatatatgtgtgggaacgtatcaagattgctttcccgaacaacaaaaagtgcaatagagtattgttgaccactcgagatcacaaggtggctcatcattgcaacaatactccacatgatttaaaatttcttagcgatgaggaaagttggatgttgctagagaagaaagtttttcacaaggctaaatgtcctccggaattggaaagacctggacagagcatagccaggaagtgtaagggacttccccttgcaattgtggtgattgcaggagctctaatagggaaacgcaagacaacaagggagtgggagcaagtggatcagagtgttggtgaacacctcattaatagaaaccagccaaagaattgtaataaaattggtgcaaatgagttatgatcgtttgccttacgacttgaaagcatgctttttgtattgtggtgcatttcccagaggctttgagatccctgcttggaatttgatccgtttatggatcgccgaaggcttcatccaatacaaagggcccttatcccttgaacgtaaagcagaggattacttgaatgatctcgtcaacagaaacttagtgatgataattcaaaggacgtctgatggacaaatcaaaacatgtcgtgttcatgacatgttgcatgagttttgctggcaagaggccacaacagaagaaaatcttttccaagaggtaaaattaggtgttgggcaatttgctcgtgagatacagcaactatccacctaccgccgcttgtgcattcattcctcagttctggaattcatttctatgaagccctctggtgagcatgttaggtcattcctatgtttttcttcagaaaaaattgacatgcccccggttgacatcccaaacataccaaaagactttccattgctaagggtgttggatgctgaatccatcaaattcagttgcttttgcagggagtttttccaattgtattttctgaggtatattgctttctcatctgactttatcaagatccttcctaaacatattggggaactatggaacgtacaaaccctcattgttaacacacaacagagcaatcttgatattcaagcagacatatggaacatgccacggctgaggcatctgcacactaacacgtccgctaaattgcctacgcctgttgccccaaaaagtagcaaggttacctcggtaaatcaatgcctacaaactctctccacaattgcaccagaaagctgcacagaagaagttttttcaagggctccaaacttgaaaaaactgggcattcgtggtaaaatctttatgcttctggaaccaaataagtccgaattgttcaacaatgttaagaagctacaatgtcttgagaacttgaagctgataaatgttggtcaaagtgggaaacaattacgccttcctccaacatatatatttccgacaaatttgaggaagctaacattattagatacctggttggagtgggatgatatgtctgtattgggccagttagagtaccttgaagtcttgaagctgaaagacaatgcatttaagggagaatactgggaaccaaaagttggaggttttcgttccctactagtgttatggatcgaaaggtcagatttagcttcttggaatgcttcaagtgatcactttccaagacttaagcgtcttgttctcgtatcatgtgataaacttgaggaggtccccattggcttggctgatatacgcggcctccaagttatggagttgcgaaattcaaccaagcaaacagcaaaatctgcccgggatatacaggccaaaaaagacaagcaaactcaagaaggggctaaaacccaaaggttcaagctttctatattccctccttatctctgatcaacgcggcgtacagcttctttgaaaggttagttaaatcttccctcactactgtttgatttgtgtttcataatccaaaggaaatgtttaacttgggtgcaattctctgctatctccccttttccaaggaggggtataacttgctaaaatactcgccagtaacatgcagataagaatatttagtaactatgaatttaaacaattcaatcagccagtttctttatctcaaaatcctgtccgttatcatttaacaaacattgaccagaaatatagatgctacaaagttatctccttgcattttgtgctggaaacctaacttctgcaatccttttctgttttcttttttatttcaatggttctctgacttccatatactaataggagtgacagatcacaattttgaacatcatttggaatagtaatcgactaatcgtcagtgtcaaatagttggatgcagtttaattacactctaagtcatgtggcaataatcttatgcatattttctctattggctactcgttttcccttgggatttttggttgcatttagtgattaaccttatgctttgataaaaattcagtaggtaacattctccttggtagggttttattttttttccattctggcctacaatagcaatataggtttttattaaaggaaaaaactaaccagtgagcgttgctattggtacaggtctgaaataattgcatgatgttggctgctggctttttcttccttcagctttatttggctcactgctctcacagtgaagcctattgcattgtcataagtggaacgactgaaccacagttttatgattcttgggtttctttctgtatttcatttgtttgatgtgttttctgttttattttggggttgaaactgtatgttgttcttttcattgtggtgttaacccataaggatagtgtactttaaactacaataagagttgattgattgttggagtcgttggcttcaaagcacaaaatatggatgtacctcaactgcttcatattccagatatatatagtcaggtaaagttataattaactgcatcacactttaatttatcatgcttaaaaataaaggtttgcagattaattacacaaatatgcaagtgattcagtgagataattgcttctacgaatctaaaggtatctcaagaaagctgaatctgatgttaagcgatggcggtacttgaaaataggcctaggaatggaaaccaatactcttaattctgcagtttttccagctgctccaagaggttgcttgaaaatgtacaaggagccggaggacaaagaagaagtattcaaaaatcacaaaaaatccatctgtttatatatattattctttaaagttacaatagatgatatgacatctcttagactagaaaataatatatttgtttttttctcattgcagcccaaaatttctaaataaatgactaataatattactctctctctcatctgtttagttaatttaaacagatgagaatgtgagaggtttttatacactctttttctctatccaaaagtctctaattacaattactaatgacaattaggagtaattactatttataacggagtaggtcaaaccgaaaaaaaaaagttacaaggtggtagtcatttttatttttgttttcatgctttgcgtaaaactgaaaagacagagagaacttatactgttatgttgccgttgaccactctgtcctcggaggtacagatcattaggagctcgattaatattcctaatcacattcaaaaacttttcttttccagcttcactcacgctcaaatcgcgcaacagatcatgcataccgcatcttttgactgaccattgagcttcctccttgtgaccattactaaatttcgacaagccagatcttccaaacaatcctctgctacttcttccaggcttcttaacttattactctttagaatcccctctgcaacccacaattggatcaatctcatgatcctcggggaatgttcctaaatggaggaaacaaggtttcaagtgaataggcaggtgatagtaactcatagcaagtaccgcaaccatatggaactgggtaagtgttctatatcccaaagtaattatacttcatgattctatggttatattcatcatttatttcggatttaaatggacgaaatcaagatttttgcaaaacttttcaagaacgaaaatttaagatttggaggtccacaatacttgaacaaaatggtgtggtggaatgtaaaaataaaaatgttgttgaaattgcattagctcttcttgatacatcaaatgttccaaaaatattaggcaatcatcttccgtcattaaacaaaattgcccctattttaatttattcctttttaaaaattgcccgaactactctcatcttaaagtatttggttgtatatattttgttcttcttcaagatcatgaacgtcataaattatcctctaaagctggtaagtgtatttttgtggggtacaatgacattcaaaaaggatatttgtgttatgatccaatacgccattcattgagaatttctcgacacgttatcttctttgaaaattcttttacttatgctagtaaagactcacaatcttctactaagtcctttttgcaaaaaaaattcactcatgattttgttggccataacaacctagccactggtccattgtagaacttgctcgctactacaactggtactactgatgactctgatccttttttgataatgattctaccttggtaaacgctaatcctttacctcaataacatgagacacatattattccgttaaatcttaataaccaaccttctcctcctcgtcaaaatgccattagacacttacttcgtcacgttctccctccagatcgatatgaatactcaccaggtgaatatggcagaccatacgccttgctaactatattaaattctatggttgtgccaagttcttatatgcaggcaagtggtcagaaatgctgggaggatgcaatgcatgaagaattggttgtccttgagaaaaatgatacacggggatatggtggagagaccgaaaaatgcaataattattgtaagtagatgggtgtactcaatcaagatgaaagctgatggatccctatatcgatacaaggcaagattggtggctcaagggtacaaatagaaatatggaattggctatgataaaatatttgctccggtagctaagatgacgacaatatgtatattgcttgctttcgcgtcaataaaaagttgaaagttacatcaactggacgtcaagaatgttttcatgcacggagacttgcaagaagtggtctatatgaatccactaccaggttataaacattctagcgcaaattaggtgtgtcgtcttaaaaaaatctttgtatggattaaagcagactcctcgctcttggtttgaaaaatttcggacaaaaatcctaggtgctggttttactcagagcatctcagattattcattattcctacgtcggtccagctcagatattactattctccttatttacatagatgatgtgattatcacagaaaatgatgaagttggaatctctcatctgaaaaaactattagactccttgttcaagatgaaggacctaggaaagctaaagttaactattagaagtcatacgattgagtccgcaaaagtatgcagaagatcttcagttaactaatctcacagatgataagaaggttcatactccaatggaagtgaatacgaaatacaaaaaagaggaaggagaacattttggagatcaaactttgtatagacgtttggttgggtcacttatatatcttaccatgagtcgtcatgatatctcttatgcagtacacgtgttaagttaattcatcactaagacttttaagatccactactcagctttgctcagggttattagatacataaggggtattgtgaatcgaagtctcttatttccatcatattcatcgctggacatggtgggatatgctgatgcagattgggctggatgccctgattcaagatgatctactacatgctggtacatgatgcttgtctcgtgcatgatctcatggaagtgtaagaaacaatcctgaacatcgaagtcatccacagaggcagaatatagaagtatgtttgttgcatgctttgaaatcatttggctacgaaggctattatcagaacttgacatcaagatcgaaggatcaaccatattgtatgtagacaataccaatgcaattcgaatagcaaccaacctcgttcatcatgaaaatacaaagcacatagacgtagacggcaactacatcagagaactggttgaagatcggagcattaacctaaggtatatatcatctaattaaagatcaactagcagatttgttcacaaaggctatgccaagaagtcgacacaattatcttctatccaaactcatgctttgtgatacatagcattagtttgcgggagggtgttgactataccttatttaagagcccaatctcagggatctcccattatgcctaacagtcaaattgtagagcaaattagctgcccaatttcagggatatttgtctagcaattagtaggctagtaatcaggagataattgagactcctttgcttgtataaatagcttttaaatcctacaattctgaacattgaaatatattagtattctttcattttctgtatctctctctttttcaataaaggcttcaacgacctattttaaattgaaagtgaatttcttctcatccttttttcttcttttagactagtaatttcccttaaaacggaagaaagtttgtagttcccaatctaaatgatatttaaaaattgggtttccaatgtgaaagatataaaagagagttccaaatatttcatttctcccaaattctgtaatgaccagaagatcacattaccaccaaatatatgtgatgatgacagacgagtaaaaaaacaacttcgacatagttgtgaatgagaataagagggggttacgttgtcaatactttaaattcggaagaaattcaaaaatagctagatttacaagtggtcatttaaaaatagtcacagtttcaaaagtaattaaaatttagccatttttcatgtaaagataaatctaaatgaaaacattgttcaaaatccggaaaaatactgcagcataatatactggagttccagtatattatactggtccagcataatatactggagtttggagcaccggtgctccagtctccagtatattatactggagccaacaaagtataccggtccagnnnnnnnnnnnnnnnnnnnnnnnnnnnnnnnnnnnnnnnnnnnnnnnnnnnnnnnnnnnnnnnnnnnnnnnnnnnnnnnnnnnnnnnnnnnnnnnnnnnnnnnnnnnnnnnnnnnnnnnnnnnnnnnnnnnnnnnnnnnnnnnnnnnnnnnnnnnnnnnnnnnnnnnnnnnnnnnnnnnnnnnnnnnnnnnnnnnnnnnnnnnnnnnnnnnnnnnnnnnnnnnnnnnnnnnnnnnnnnnnnnnnnnnnnnnnnnnnnnnnnnnnnnnnnnnnnnnnnnnnnnnnnnnnnnnnnnnnnnnnnnnnnnnnnnnnnnnnnnnnnnnnnnnnnnnnnnnnnnnnnnnnnnnnnnnnnnnnnnnnnnnnnnnnnnnnnnnnnnnnnnnnnnnnnnnnnnnnnnnnnnnnnnnnnnnnnnnnnnnnnnnnnnnnnnnnnnnnnnnnnnnnnnnnnnnnnnnnnnnnnnnnnnnnnnnnnnnnnnnnnnnnnnnnnnnnnnnnnnnnnnnnnnnnnnnnnnnnnnnnnnnnnnnnnnnnnnnnnnnnnnnnnnnnnnnnnnnnnnnnnnnnnnnnnnnnnnnnnnnnnnnnnnnnnnnnnnnnnnnnnnnnnnnnnnnnnnnnnnnnnnnnnnnnnnnnnnnnnnnnnnnnnnnnnnnnnnnnnnnnnnnnnnnnnnnnnnnnnnnnnnnnnnnnnnnnnnnnnnnnnnnnnnnnnnnnnnnnnnnnnnnnnnnnnnnnnnnnnnnnnnnnnnnnnnnnnnnnnnnnnnnnnnnnnnnnnnnnnnnnnnnnnnnnnnnnnnnnnnnnnnnnnnnnnnnnnnnnnnnnnnnnnnnnnnnnnnnnnnnnnnnnnnnnnnnnnnnnnnnnnnnnnnnnnnnnnnnnnnnnnnnnnnnnnnnnnnnnnnnnnnnnnnnnnnnnnnnnnnnnnnnnnnnnnnnnnnnnnnnnnnnnnnnnnnnnnnnnnnnnnnnnnnnnnnnnnnnnnnnnnnnnnnnnnnnnnnnnnnnnnnnnnnnnnnnnnnnnnnnnnnnnnnnnnnnnnnnnnnnnnnnnnnnnnnnnnnnnnnnnnnnnnnnnnnnnnnnnnnnnnnnnnnnnnnagaagttcatatacaggtgcaccgaactccagtatattatgctgaatcgatctctgttgcagcaaaatagtggctattttttaatgacttgacaaacgctgactatttttgaatgaccagtccgaaaactggctagaccttactattttaactgaatacttttcaaaatcattgttaagaaataatttgaatatttttagtaaaactaataaatgttagaaaagggtaaaaagttaccatattattataggaaatattttaattttaccattcattatactttgggactattcatacggttattttagaaaatcgtctcatttttacccttgacctagtggagttcaaacctaaagcataatggtatatatttttaaaatcataatcaaaagtaaaatgtataaagaccctctttttaacaatgttttgatatgtggaatatacccgtcaatattggggctctattaaaatcaaaagctgatacgaaatgaactgataaatctacctcaatttaaaattcatttaatgtataaataaataatcttagaaatttgttagaatataaaatttacctcaatttttaataattattttttgtattacctgtattaagtttatctttacaaagtttttactttcttatattctcaattgtgtaaatagattttgagtatttattgttattaattaaataactgatatgtgcaattttttaattttaaagttcttattctgctcatttatttcattatcaaacgtcattattccatatgcttaattattacttctcactttttttgttctaaaataatatctatttttcaataggtaaaaagtatatcatgttattaaagaagaaaaaaaattaataatttagagggtaaaatggggaatcaattgagatatgagcagaaaaatgcctattgatcaaagctagagacgtctaataatacgtaagtcagcaatcctaaaatacggtttataattttgcatcttaaaatcgatttataaatcgcatttgacacagctccctaatctccctgctcttttggctgatcaacctttcatctttctcgttgaatgattgtgcctttttttctaaatttgtttgttcttcaaaagagtacattagcaaatgattattgccgactttaatttgttccaaatgagtaactgactattaattttgtatgcaaaagcaggtgacttggataccgcacacattattatatttgacaagttgcaattcaaatgcctgatataatagaatgctatgattgtaggatacgatgcacaagggtattggagaaaataggcctgagtaccatagattgaacagagagttgtacatccagatcagtatacatttgcatagatcagtctttagatagcagtcctggagcagggtaaagaaagcacgtgctctattgattaatagccaaagtaatggaaatattataatagtatccttatggacggacatgcatgtatttcaagagtagatgatggctatctcgtgtttagtaagtccttggaaaggaatagggtgacagatgaaataatatttcgaggccccaaaaagtgttaatagtgaaatacataataatatttcgcttagataatatgaagttggtaggaaattaaaataaaacatctttataagaaagaaagaaatactagttaaactttctattagtggataaagttttttacgacaagatccaatgtagtatatttacaaacacattattaaggaaaaggcataagtatcctccttgaaccaaggccggatttttaattacacgtcttatctttgcggggtcttattatatatatatccctgaactattaaagcatcatgctttcatacaggatctgggaaggggtcgcaccccaactagatgtgatcgatataggtaatctattctgatataagcatcagtgacaaataattatgtattatatatacgaaaataataaaatgcatacatatgataaggcatactcattttgaaaatgagaggacaaaacttctaaaaatcactccatgagcttagatttatataagaaggtttttgtcacgatccggatttctcatcctcgggagtcgtgatggtgcctactaatatgagatagacaagctagtcctttaaactaattacttcactatccatttatttctttttacaaacataaagcgataacagaaaaacagcaaaaatttaaattaagcggaagaaaacaataaaatatctgaaatttgtatccattacactgcttaagccttaatcacccaaaacatggtgtcatagtaccacagacggtctaaaatttactatatacaaagtctgaataacatgagcgatacactgtttctgaagcaaaagatgaaacaggaaaataaagataaaggggacgccagggcctgcggacgcttgcaggtctaccttggatctccgcgtggactgaaggtagcctctaactacggtccaagagatgcttcgggatctgcacatagtgcagagtgtagtatcagcacaatcgaccccatgtgctggtaagtgtctagcctaacttcggcgaagtagtgactaggctaggaccagactaccaaataaacctgtgcaattcaaatacatatacatcgaaaaagaaatacagaaataaccagtcaagtatgggagagggagcatgctatggggaagatgttaattccgaacagaaagacaactgtaaatggaagaagcaataaatctcagatatcaataaaaaaaaaagcaataaatgcacggcatcacccttcatgcttttactcttatcctcaccaaagcagccatataatgaaaacatgcacggctgtcacacctcctttttgcgcgccctgccccgaggggttaggtgcgcgggtggagttttttccaatttaagtgacaatattcgaaatgggattattcataacacaggggttgggtctgtctagggctagcaacctgaaatgaaaaagaccatcttgatgcatcctatgtgctacatgttgcattccttcaggggtaaaagggtcatttggcggaccaatgataattgagagtgaatgaaaagg

SEQ ID NO: 2 - DNA, 1142417 bp, Nicotiana tabacum
  modified_base (15699)..(16721): a, c, t, g, unknown or other
  misc_feature (15699)..(16721): n is a, c, g, or t
  modified_base (18653)..(19126): a, c, t, g, unknown or other
  misc_feature (18653)..(19126): n is a, c, g, or t
  modified_base (20216)..(20303): a, c, t, g, unknown or other
  misc_feature (20216)..(20303): n is a, c, g, or t
  modified_base (21426)..(21500): a, c, t, g, unknown or other
  misc_feature (21426)..(21500): n is a, c, g, or t
  modified_base (22281)..(22367): a, c, t, g, unknown or other
  misc_feature (22281)..(22367): n is a, c, g, or t
  modified_base (23021)..(23832): a, c, t, g, unknown or other
  misc_feature (23021)..(23832): n is a, c, g, or t
  modified_base (26490)..(26919): a, c, t, g, unknown or other
  misc_feature (26490)..(26919): n is a, c, g, or t
  modified_base (29220)..(29287): a, c, t, g, unknown or other
  misc_feature (29220)..(29287): n is a, c, g, or t
  modified_base (29801)..(29895): a, c, t, g, unknown or other
  misc_feature (29801)..(29895): n is a, c, g, or t
  modified_base (34245)..(34279): a, c, t, g, unknown or other
  misc_feature (34245)..(34279): n is a, c, g, or t
  modified_base (34375)..(34486): a, c, t, g, unknown or other
  misc_feature (34375)..(34486): n is a, c, g, or t
  modified_base (34756)..(34920): a, c, t, g, unknown or other
  misc_feature (34756)..(34920): n is a, c, g, or t
  modified_base (35876)..(35920): a, c, t, g, unknown or other
  misc_feature (35876)..(35920): n is a, c, g, or t
  modified_base (36016)..(36410): a, c, t, g, unknown or other
  misc_feature (36016)..(36410): n is a, c, g, or t
  modified_base (80036)..(80140): a, c, t, g, unknown or other
  misc_feature (80036)..(80140): n is a, c, g, or t
  modified_base (82170)..(82248): a, c, t, g, unknown or other
  misc_feature (82170)..(82248): n is a, c, g, or t
  modified_base (82396)..(84734): a, c, t, g, unknown or other
  misc_feature (82396)..(84734): n is a, c, g, or t
  modified_base (84884)..(85976): a, c, t, g, unknown or other
  misc_feature (84884)..(85976): n is a, c, g, or t
  modified_base (86174)..(86841): a, c, t, g, unknown or other
  misc_feature (86174)..(86841): n is a, c, g, or t
  modified_base (87131)..(87452): a, c, t, g, unknown or other
  misc_feature (87131)..(87452): n is a, c, g, or t
  modified_base (88022)..(88827): a, c, t, g, unknown or other
  misc_feature (88022)..(88827): n is a, c, g, or t
  modified_base (96622)..(97793): a, c, t, g, unknown or other
  misc_feature (96622)..(97793): n is a, c, g, or t
  modified_base (115612)..(116395): a, c, t, g, unknown or other
  misc_feature (115612)..(116395): n is a, c, g, or t
  modified_base (116530)..(116669): a, c, t, g, unknown or other
  misc_feature (116530)..(116669): n is a, c, g, or t
  modified_base (118244)..(118425): a, c, t, g, unknown or other
  misc_feature (118244)..(118425): n is a, c, g, or t
  modified_base (119940)..(120159): a, c, t, g, unknown or other
  misc_feature (119940)..(120159): n is a, c, g, or t
  modified_base (120358)..(121153): a, c, t, g, unknown or other
  misc_feature (120358)..(121153): n is a, c, g, or t
  modified_base (136656)..(136679): a, c, t, g, unknown or other
  misc_feature (136656)..(136679): n is a, c, g, or t
  modified_base (153444)..(153530): a, c, t, g, unknown or other
  misc_feature (153444)..(153530): n is a, c, g, or t
  modified_base (154048)..(154113): a, c, t, g, unknown or other
  misc_feature (154048)..(154113): n is a, c, g, or t
  modified_base (159531)..(159600): a, c, t, g, unknown or other
  misc_feature (159531)..(159600): n is a, c, g, or t
  modified_base (174358)..(175182): a, c, t, g, unknown or other
  misc_feature (174358)..(175182): n is a, c, g, or t
  modified_base (180271)..(181026): a, c, t, g, unknown or other
  misc_feature (180271)..(181026): n is a, c, g, or t
  modified_base (183331)..(184242): a, c, t, g, unknown or other
  misc_feature (183331)..(184242): n is a, c, g, or t
  modified_base (200934)..(201936): a, c, t, g, unknown or other
  misc_feature (200934)..(201936): n is a, c, g, or t
  modified_base (207040)..(207168): a, c, t, g, unknown or other
  misc_feature (207040)..(207168): n is a, c, g, or t
  modified_base (208121)..(209053): a, c, t, g, unknown or other
  misc_feature (208121)..(209053): n is a, c, g, or t
  modified_base (209748)..(209827): a, c, t, g, unknown or other
  misc_feature (209748)..(209827): n is a, c, g, or t
  modified_base (224894)..(225025): a, c, t, g, unknown or other
  misc_feature (224894)..(225025): n is a, c, g, or t
  modified_base (225127)..(225176): a, c, t, g, unknown or other
  misc_feature (225127)..(225176): n is a, c, g, or t
  modified_base (237231)..(238318): a, c, t, g, unknown or other
  misc_feature (237231)..(238318): n is a, c, g, or t
  modified_base (239684)..(240379): a, c, t, g, unknown or other
  misc_feature (239684)..(240379): n is a, c, g, or t
  modified_base (242311)..(242517): a, c, t, g, unknown or other
  misc_feature (242311)..(242517): n is a, c, g, or t
  modified_base (243188)..(243277): a, c, t, g, unknown or other
  misc_feature (243188)..(243277): n is a, c, g, or t
  modified_base (243422)..(243497): a, c, t, g, unknown or other
  misc_feature (243422)..(243497): n is a, c, g, or t
  modified_base (245953)..(246022): a, c, t, g, unknown or other
  misc_feature (245953)..(246022): n is a, c, g, or t
  modified_base (253401)..(253458): a, c, t, g, unknown or other
  misc_feature (253401)..(253458): n is a, c, g, or t
  modified_base (255427)..(255501): a, c, t, g, unknown or other
  misc_feature (255427)..(255501): n is a, c, g, or t
  modified_base (257119)..(257245): a, c, t, g, unknown or other
  misc_feature (257119)..(257245): n is a, c, g, or t
  modified_base (258258)..(258689): a, c, t, g, unknown or other
  misc_feature (258258)..(258689): n is a, c, g, or t
  modified_base (262541)..(262594): a, c, t, g, unknown or other
  misc_feature (262541)..(262594): n is a, c, g, or t
  modified_base (271906)..(272008): a, c, t, g, unknown or other
  misc_feature (271906)..(272008): n is a, c, g, or t
  modified_base (272366)..(273087): a, c, t, g, unknown or other
  misc_feature (272366)..(273087): n is a, c, g, or t
  modified_base (279815)..(280878): a, c, t, g, unknown or other
  misc_feature (279815)..(280878): n is a, c, g, or t
  modified_base (308143)..(309196): a, c, t, g, unknown or other
  misc_feature (308143)..(309196): n is a, c, g, or t
  modified_base (311632)..(312626): a, c, t, g, unknown or other
  misc_feature (311632)..(312626): n is a, c, g, or t
  modified_base (324876)..(325543): a, c, t, g, unknown or other
  misc_feature (324876)..(325543): n is a, c, g, or t
  modified_base (326402)..(327425): a, c, t, g, unknown or other
  misc_feature (326402)..(327425): n is a, c, g, or t
  modified_base (332878)..(334163): a, c, t, g, unknown or other
  misc_feature (332878)..(334163): n is a, c, g, or t
  modified_base (345118)..(346005): a, c, t, g, unknown or other
  misc_feature (345118)..(346005): n is a, c, g, or t
  modified_base (347275)..(347823): a, c, t, g, unknown or other
  misc_feature (347275)..(347823): n is a, c, g, or t
  modified_base (365848)..(366627): a, c, t, g, unknown or other
  misc_feature (365848)..(366627): n is a, c, g, or t
  modified_base (368326)..(369275): a, c, t, g, unknown or other
  misc_feature (368326)..(369275): n is a, c, g, or t
  modified_base (376763)..(377128): a, c, t, g, unknown or other
  misc_feature (376763)..(377128): n is a, c, g, or t
  modified_base (378019)..(378819): a, c, t, g, unknown or other
  misc_feature (378019)..(378819): n is a, c, g, or t
  modified_base (382070)..(382744): a, c, t, g, unknown or other
  misc_feature (382070)..(382744): n is a, c, g, or t
  modified_base (383158)..(383288): a, c, t, g, unknown or other
  misc_feature (383158)..(383288): n is a, c, g, or t
  modified_base (383389)..(383829): a, c, t, g, unknown or other
  misc_feature (383389)..(383829): n is a, c, g, or t
  modified_base (394625)..(395767): a, c, t, g, unknown or other
  misc_feature (394625)..(395767): n is a, c, g, or t
  modified_base (397762)..(398711): a, c, t, g, unknown or other
  misc_feature (397762)..(398711): n is a, c, g, or t
  modified_base (402949)..(403023): a, c, t, g, unknown or other
  misc_feature (402949)..(403023): n is a, c, g, or t
  modified_base (403387)..(404028): a, c, t, g, unknown or other
  misc_feature (403387)..(404028): n is a, c, g, or t
  modified_base (406705)..(407813): a, c, t, g, unknown or other
  misc_feature (406705)..(407813): n is a, c, g, or t
  modified_base (409155)..(409262): a, c, t, g, unknown or other
  misc_feature (409155)..(409262): n is a, c, g, or t
  modified_base (409851)..(409927): a, c, t, g, unknown or other
  misc_feature (409851)..(409927): n is a, c, g, or t
  modified_base (411131)..(411266): a, c, t, g, unknown or other
  misc_feature (411131)..(411266): n is a, c, g, or t
  modified_base (411928)..(412005): a, c, t, g, unknown or other
  misc_feature (411928)..(412005): n is a, c, g, or t
  modified_base (413869)..(413939): a, c, t, g, unknown or other
  misc_feature (413869)..(413939): n is a, c, g, or t
  modified_base (414653)..(415024): a, c, t, g, unknown or other
  misc_feature (414653)..(415024): n is a, c, g, or t
  modified_base (419711)..(420669): a, c, t, g, unknown or other
  misc_feature (419711)..(420669): n is a, c, g, or t
  modified_base (422222)..(423093): a, c, t, g, unknown or other
  misc_feature (422222)..(423093): n is a, c, g, or t
  modified_base (427832)..(428882): a, c, t, g, unknown or other
  misc_feature (427832)..(428882): n is a, c, g, or t
  modified_base (431265)..(431565): a, c, t, g, unknown or other
  misc_feature (431265)..(431565): n is a, c, g, or t
  modified_base (434609)..(435797): a, c, t, g, unknown or other
  misc_feature (434609)..(435797): n is a, c, g, or t
  modified_base (445200)..(446364): a, c, t, g, unknown or other
  misc_feature (445200)..(446364): n is a, c, g, or t
  modified_base (452199)..(453295): a, c, t, g, unknown or other
  misc_feature (452199)..(453295): n is a, c, g, or t
  modified_base (455059)..(456161): a, c, t, g, unknown or other
  misc_feature (455059)..(456161): n is a, c, g, or t
  modified_base (462831)..(463554): a, c, t, g, unknown or other
  misc_feature (462831)..(463554): n is a, c, g, or t
  modified_base (466430)..(467108): a, c, t, g, unknown or other
  misc_feature (466430)..(467108): n is a, c, g, or t
  modified_base (471961)..(472871): a, c, t, g, unknown or other
  misc_feature (471961)..(472871): n is a, c, g, or t
  modified_base (476337)..(477382): a, c, t, g, unknown or other
  misc_feature (476337)..(477382): n is a, c, g, or t
  modified_base (478442)..(479806): a, c, t, g, unknown or other
  misc_feature (478442)..(479806): n is a, c, g, or t
  modified_base (488982)..(490100): a, c, t, g, unknown or other
  misc_feature (488982)..(490100): n is a, c, g, or t
  modified_base (492759)..(493831): a, c, t, g, unknown or other
  misc_feature (492759)..(493831): n is a, c, g, or t
  modified_base (503110)..(504320): a, c, t, g, unknown or other
  misc_feature (503110)..(504320): n is a, c, g, or t
  modified_base (512392)..(513585): a, c, t, g, unknown or other
  misc_feature (512392)..(513585): n is a, c, g, or t
  modified_base (523187)..(524004): a, c, t, g, unknown or other
  misc_feature (523187)..(524004): n is a, c, g, or t
  modified_base (524612)..(524690): a, c, t, g, unknown or other
  misc_feature (524612)..(524690): n is a, c, g, or t
  modified_base (525580)..(525737): a, c, t, g, unknown or other
  misc_feature (525580)..(525737): n is a, c, g, or t
  modified_base (529224)..(529299): a, c, t, g, unknown or other
  misc_feature (529224)..(529299): n is a, c, g, or t
  modified_base (533557)..(534644): a, c, t, g, unknown or other
  misc_feature (533557)..(534644): n is a, c, g, or t
  modified_base (539609)..(540192): a, c, t, g, unknown or other
  misc_feature (539609)..(540192): n is a, c, g, or t
  modified_base (541207)..(541440): a, c, t, g, unknown or other
  misc_feature (541207)..(541440): n is a, c, g, or t
  modified_base (541749)..(541862): a, c, t, g, unknown or other
  misc_feature (541749)..(541862): n is a, c, g, or t
  modified_base (545505)..(545633): a, c, t, g, unknown or other
  misc_feature (545505)..(545633): n is a, c, g, or t
  modified_base (555306)..(555367): a, c, t, g, unknown or other
  misc_feature (555306)..(555367): n is a, c, g, or t
  modified_base (557395)..(558257): a, c, t, g, unknown or other
  misc_feature (557395)..(558257): n is a, c, g, or t
  modified_base (560912)..(562114): a, c, t, g, unknown or other
  misc_feature (560912)..(562114): n is a, c, g, or t
  modified_base (562519)..(563212): a, c, t, g, unknown or other
  misc_feature (562519)..(563212): n is a, c, g, or t
  modified_base (564130)..(564333): a, c, t, g, unknown or other
  misc_feature (564130)..(564333): n is a, c, g, or t
  modified_base (564429)..(568888): a, c, t, g, unknown or other
  misc_feature (564429)..(568888): n is a, c, g, or t
  modified_base (568984)..(573409): a, c, t, g, unknown or other
  misc_feature (568984)..(573409): n is a, c, g, or t
  modified_base (574944)..(575363): a, c, t, g, unknown or other
  misc_feature (574944)..(575363): n is a, c, g, or t
  modified_base (575459)..(576486): a, c, t, g, unknown or other
  misc_feature (575459)..(576486): n is a, c, g, or t
  modified_base (576646)..(576657): a, c, t, g, unknown or other
  misc_feature (576646)..(576657): n is a, c, g, or t
  modified_base (576755)..(576807): a, c, t, g, unknown or other
  misc_feature (576755)..(576807): n is a, c, g, or t
  modified_base (577810)..(578317): a, c, t, g, unknown or other
  misc_feature (577810)..(578317): n is a, c, g, or t
  modified_base (580670)..(581750): a, c, t, g, unknown or other
  misc_feature (580670)..(581750): n is a, c, g, or t
  modified_base (584415)..(585428): a, c, t, g, unknown or other
  misc_feature (584415)..(585428): n is a, c, g, or t
  modified_base (589179)..(590231): a, c, t, g, unknown or other
  misc_feature (589179)..(590231): n is a, c, g, or t
  modified_base (595071)..(596191): a, c, t, g, unknown or other
  misc_feature (595071)..(596191): n is a, c, g, or t
  modified_base (605118)..(605119): a, c, t, g, unknown or other
  misc_feature (605118)..(605119): n is a, c, g, or t
  modified_base (607761)..(607837): a, c, t, g, unknown or other
  misc_feature (607761)..(607837): n is a, c, g, or t
  modified_base (610215)..(610301): a, c, t, g, unknown or other
  misc_feature (610215)..(610301): n is a, c, g, or t
  modified_base (613163)..(614053): a, c, t, g, unknown or other
  misc_feature (613163)..(614053): n is a, c, g, or t
  modified_base (624866)..(625700): a, c, t, g, unknown or other
  misc_feature (624866)..(625700): n is a, c, g, or t
  modified_base (626509)..(628360): a, c, t, g, unknown or other
  misc_feature (626509)..(628360): n is a, c, g, or t
  modified_base (646482)..(646843): a, c, t, g, unknown or other
  misc_feature (646482)..(646843): n is a, c, g, or t
  modified_base (648166)..(648494): a, c, t, g, unknown or other
  misc_feature (648166)..(648494): n is a, c, g, or t
  modified_base (648845)..(650052): a, c, t, g, unknown or other
  misc_feature (648845)..(650052): n is a, c, g, or t
  modified_base (659552)..(659768): a, c, t, g, unknown or other
  misc_feature (659552)..(659768): n is a, c, g, or t
  modified_base (660006)..(660115): a, c, t, g, unknown or other
  misc_feature (660006)..(660115): n is a, c, g, or t
  modified_base (661469)..(662532): a, c, t, g, unknown or other
  misc_feature (661469)..(662532): n is a, c, g, or t
  modified_base (691177)..(692223): a, c, t, g, unknown or other
  misc_feature (691177)..(692223): n is a, c, g, or t
  modified_base (693957)..(695648): a, c, t, g, unknown or other
  misc_feature (693957)..(695648): n is a, c, g, or t
  modified_base (703163)..(704541): a, c, t, g, unknown or other
  misc_feature (703163)..(704541): n is a, c, g, or t
  modified_base (706258)..(706332): a, c, t, g, unknown or other
  misc_feature (706258)..(706332): n is a, c, g, or t
  modified_base (710754)..(710813): a, c, t, g, unknown or other
  misc_feature (710754)..(710813): n is a, c, g, or t
  modified_base (711128)..(711348): a, c, t, g, unknown or other
  misc_feature (711128)..(711348): n is a, c, g, or t
  modified_base (712636)..(713802): a, c, t, g, unknown or other
  misc_feature (712636)..(713802): n is a, c, g, or t
  modified_base (718069)..(719115): a, c, t, g, unknown or other
  misc_feature (718069)..(719115): n is a, c, g, or t
  modified_base (723756)..(723902): a, c, t, g, unknown or other
  misc_feature (723756)..(723902): n is a, c, g, or t
  modified_base (732237)..(732416): a, c, t, g, unknown or other
  misc_feature (732237)..(732416): n is a, c, g, or t
  modified_base (734237)..(735145): a, c, t, g, unknown or other
  misc_feature (734237)..(735145): n is a, c, g, or t
  modified_base (738208)..(739415): a, c, t, g, unknown or other
  misc_feature (738208)..(739415): n is a, c, g, or t
  modified_base (742409)..(743098): a, c, t, g, unknown or other
  misc_feature (742409)..(743098): n is a, c, g, or t
  modified_base (751770)..(752469): a, c, t, g, unknown or other
  misc_feature (751770)..(752469): n is a, c, g, or t
  modified_base (752860)..(754010): a, c, t, g, unknown or other
  misc_feature (752860)..(754010): n is a, c, g, or t
  modified_base (759306)..(760477): a, c, t, g, unknown or other
  misc_feature (759306)..(760477): n is a, c, g, or t
  modified_base (767400)..(767995): a, c, t, g, unknown or other
  misc_feature (767400)..(767995): n is a, c, g, or t
  modified_base (778242)..(779473): a, c, t, g, unknown or other
  misc_feature (778242)..(779473): n is a, c, g, or t
  modified_base (790911)..(791801): a, c, t, g, unknown or other
  misc_feature (790911)..(791801): n is a, c, g, or t
  modified_base (798279)..(799394): a, c, t, g, unknown or other
  misc_feature (798279)..(799394): n is a, c, g, or t
  modified_base (800566)..(800748): a, c, t, g, unknown or other
  misc_feature (800566)..(800748): n is a, c, g, or t
  modified_base (803607)..(804602): a, c, t, g, unknown or other
  misc_feature (803607)..(804602): n is a, c, g, or t
  modified_base (807010)..(808195): a, c, t, g, unknown or other
  misc_feature (807010)..(808195): n is a, c, g, or t
  modified_base (810998)..(811871): a, c, t, g, unknown or other
  misc_feature (810998)..(811871): n is a, c, g, or t
  modified_base (813857)..(813930): a, c, t, g, unknown or other
  misc_feature (813857)..(813930): n is a, c, g, or t
  modified_base (815301)..(815638): a, c, t, g, unknown or other
  misc_feature (815301)..(815638): n is a, c, g, or t
  modified_base (817168)..(817270): a, c, t, g, unknown or other
  misc_feature (817168)..(817270): n is a, c, g, or t
  modified_base (817509)..(817736): a, c, t, g, unknown or other
  misc_feature (817509)..(817736): n is a, c, g, or t
  modified_base (817958)..(820437): a, c, t, g, unknown or other
  misc_feature (817958)..(820437): n is a, c, g, or t
  modified_base (821238)..(822427): a, c, t, g, unknown or other
  misc_feature (821238)..(822427): n is a, c, g, or t
  modified_base (822853)..(823225): a, c, t, g, unknown or other
  misc_feature (822853)..(823225): n is a, c, g, or t
  modified_base (823455)..(823768): a, c, t, g, unknown or other
  misc_feature (823455)..(823768): n is a, c, g, or t
  modified_base (824491)..(825833): a, c, t, g, unknown or other
  misc_feature (824491)..(825833): n is a, c, g, or t
  modified_base (825939)..(826224): a, c, t, g, unknown or other
  misc_feature (825939)..(826224): n is a, c, g, or t
  modified_base (826454)..(826732): a, c, t, g, unknown or other
  misc_feature (826454)..(826732): n is a, c, g, or t
  modified_base (827844)..(828737): a, c, t, g, unknown or other
  misc_feature (827844)..(828737): n is a, c, g, or t
  modified_base (828967)..(829060): a, c, t, g, unknown or other
  misc_feature (828967)..(829060): n is a, c, g, or t
  modified_base (829247)..(829304): a, c, t, g, unknown or other
  misc_feature (829247)..(829304): n is a, c, g, or t
  modified_base (829544)..(829596): a, c, t, g, unknown or other
  misc_feature (829544)..(829596): n is a, c, g, or t
  modified_base (832211)..(832372): a, c, t, g, unknown or other
  misc_feature (832211)..(832372): n is a, c, g, or t
  modified_base (832572)..(833077): a, c, t, g, unknown or other
  misc_feature (832572)..(833077): n is a, c, g, or t
  modified_base (837445)..(838529): a, c, t, g, unknown or other
  misc_feature (837445)..(838529): n is a, c, g, or t
  modified_base (839295)..(839923): a, c, t, g, unknown or other
  misc_feature (839295)..(839923): n is a, c, g, or t
  modified_base (842325)..(843198): a, c, t, g, unknown or other
  misc_feature (842325)..(843198): n is a, c, g, or t
  modified_base (843986)..(844064): a, c, t, g, unknown or other
  misc_feature (843986)..(844064): n is a, c, g, or t
  modified_base (845422)..(846114): a, c, t, g, unknown or other
  misc_feature (845422)..(846114): n is a, c, g, or t
  modified_base (861212)..(862089): a, c, t, g, unknown or other
  misc_feature (861212)..(862089): n is a, c, g, or t
  modified_base (862971)..(863032): a, c, t, g, unknown or other
  misc_feature (862971)..(863032): n is a, c, g, or t
  modified_base (863141)..(863272): a, c, t, g, unknown or other
  misc_feature (863141)..(863272): n is a, c, g, or t
  modified_base (869808)..(870273): a, c, t, g, unknown or other
  misc_feature (869808)..(870273): n is a, c, g, or t
  modified_base (870884)..(871216): a, c, t, g, unknown or other
  misc_feature (870884)..(871216): n is a, c, g, or t
  modified_base (871581)..(871680): a, c, t, g, unknown or other
  misc_feature (871581)..(871680): n is a, c, g, or t
  modified_base (872189)..(872266): a, c, t, g, unknown or other
  misc_feature (872189)..(872266): n is a, c, g, or t
  modified_base (872464)..(872547): a, c, t, g, unknown or other
  misc_feature (872464)..(872547): n is a, c, g, or t
  modified_base (873115)..(873203): a, c, t, g, unknown or other
  misc_feature (873115)..(873203): n is a, c, g, or t
  modified_base (873475)..(874101): a, c, t, g, unknown or other
  misc_feature (873475)..(874101): n is a, c, g, or t
  modified_base (876065)..(878672): a, c, t, g, unknown or other
  misc_feature (876065)..(878672): n is a, c, g, or t
  modified_base (880120)..(880120): a, c, t, g, unknown or other
  misc_feature (880120)..(880120): n is a, c, g, or t
  modified_base (881059)..(884115): a, c, t, g, unknown or other
  misc_feature (881059)..(884115): n is a, c, g, or t
  modified_base (887566)..(888620): a, c, t, g, unknown or other
  misc_feature (887566)..(888620): n is a, c, g, or t
  modified_base (892052)..(892406): a, c, t, g, unknown or other
  misc_feature (892052)..(892406): n is a, c, g, or t
  modified_base (894065)..(895251): a, c, t, g, unknown or other
  misc_feature (894065)..(895251): n is a, c, g, or t
  modified_base (897572)..(898685): a, c, t, g, unknown or other
  misc_feature (897572)..(898685): n is a, c, g, or t
  modified_base (904873)..(905594): a, c, t, g, unknown or other
  misc_feature (904873)..(905594): n is a, c, g, or t
  modified_base (906005)..(906741): a, c, t, g, unknown or other
  misc_feature (906005)..(906741): n is a, c, g, or t
  modified_base (909458)..(910618): a, c, t, g, unknown or other
  misc_feature (909458)..(910618): n is a, c, g, or t
  modified_base (915055)..(916250): a, c, t, g, unknown or other
  misc_feature (915055)..(916250): n is a, c, g, or t
  modified_base (919646)..(920709): a, c, t, g, unknown or other
  misc_feature (919646)..(920709): n is a, c, g, or t
  modified_base (925217)..(926418): a, c, t, g, unknown or other
  misc_feature (925217)..(926418): n is a, c, g, or t
  modified_base (929276)..(929903): a, c, t, g, unknown or other
  misc_feature (929276)..(929903): n is a, c, g, or t
  modified_base (931651)..(932767): a, c, t, g, unknown or other
  misc_feature (931651)..(932767): n is a, c, g, or t
  modified_base (935855)..(935994): a, c, t, g, unknown or other
  misc_feature (935855)..(935994): n is a, c, g, or t
  modified_base (938984)..(939036): a, c, t, g, unknown or other
  misc_feature (938984)..(939036): n is a, c, g, or t
  modified_base (944511)..(944576): a, c, t, g, unknown or other
  misc_feature (944511)..(944576): n is a, c, g, or t
  modified_base (945150)..(945735): a, c, t, g, unknown or other
  misc_feature (945150)..(945735): n is a, c, g, or t
  modified_base (949104)..(949193): a, c, t, g, unknown or other
  misc_feature (949104)..(949193): n is a, c, g, or t
  modified_base (949659)..(949727): a, c, t, g, unknown or other
  misc_feature (949659)..(949727): n is a, c, g, or t
  modified_base (950734)..(950835): a, c, t, g, unknown or other
  misc_feature (950734)..(950835): n is a, c, g, or t
  modified_base (950955)..(951150): a, c, t, g, unknown or other
  misc_feature (950955)..(951150): n is a, c, g, or t
  modified_base (953724)..(954617): a, c, t, g, unknown or other
  misc_feature (953724)..(954617): n is a, c, g, or t
  modified_base (958666)..(959049): a, c, t, g, unknown or other
  misc_feature (958666)..(959049): n is a, c, g, or t
  modified_base (963107)..(963717): a, c, t, g, unknown or other
  misc_feature (963107)..(963717): n is a, c, g, or t
  modified_base (967607)..(967848): a, c, t, g, unknown or other
  misc_feature (967607)..(967848): n is a, c, g, or t
  modified_base (968058)..(968380): a, c, t, g, unknown or other
  misc_feature (968058)..(968380): n is a, c, g, or t
  modified_base (974177)..(975275): a, c, t, g, unknown or other
  misc_feature (974177)..(975275): n is a, c, g, or t
  modified_base (976674)..(976747): a, c, t, g, unknown or other
  misc_feature (976674)..(976747): n is a, c, g, or t
  modified_base (977219)..(977302): a, c, t, g, unknown or other
  misc_feature (977219)..(977302): n is a, c, g, or t
  modified_base (979128)..(979523): a, c, t, g, unknown or other
  misc_feature (979128)..(979523): n is a, c, g, or t
  modified_base (979926)..(980203): a, c, t, g, unknown or other
  misc_feature (979926)..(980203): n is a, c, g, or t
  modified_base (982509)..(983662): a, c, t, g, unknown or other
  misc_feature (982509)..(983662): n is a, c, g, or t
  modified_base (987092)..(987848): a, c, t, g, unknown or other
  misc_feature (987092)..(987848): n is a, c, g, or t
  modified_base (995347)..(996024): a, c, t, g, unknown or other
  misc_feature (995347)..(996024): n is a, c, g, or t
  modified_base (998513)..(998577): a, c, t, g, unknown or other
  misc_feature (998513)..(998577): n is a, c, g, or t
  modified_base (1000853)..(1001000): a, c, t, g, unknown or other
  misc_feature (1000853)..(1001000): n is a, c, g, or t
  modified_base (1001973)..(1002062): a, c, t, g, unknown or other
  misc_feature (1001973)..(1002062): n is a, c, g, or t
  modified_base (1002429)..(1002519): a, c, t, g, unknown or other
  misc_feature (1002429)..(1002519): n is a, c, g, or t
  modified_base (1004854)..(1005697): a, c, t, g, unknown or other
  misc_feature (1004854)..(1005697): n is a, c, g, or t
  modified_base (1010410)..(1010464): a, c, t, g, unknown or other
  misc_feature (1010410)..(1010464): n is a, c, g, or t
  modified_base (1013310)..(1013433): a, c, t, g, unknown or other
  misc_feature (1013310)..(1013433): n is a, c, g, or t
  modified_base (1014282)..(1014439): a, c, t, g, unknown or other
  misc_feature (1014282)..(1014439): n is a, c, g, or t
  modified_base (1014626)..(1017452): a, c, t, g, unknown or other
  misc_feature (1014626)..(1017452): n is a, c, g, or t
  modified_base (1017718)..(1018270): a, c, t, g, unknown or other
  misc_feature (1017718)..(1018270): n is a, c, g, or t
  modified_base (1023795)..(1024783): a, c, t, g, unknown or other
  misc_feature (1023795)..(1024783): n is a, c, g, or t
  modified_base (1032994)..(1034211): a, c, t, g, unknown or other
  misc_feature (1032994)..(1034211): n is a, c, g, or t
  modified_base (1039209)..(1039973): a, c, t, g, unknown or other
  misc_feature (1039209)..(1039973): n is a, c, g, or t
  modified_base (1041566)..(1042620): a, c, t, g, unknown or other
  misc_feature (1041566)..(1042620): n is a, c, g, or t
  modified_base (1045232)..(1046546): a, c, t, g, unknown or other
  misc_feature (1045232)..(1046546): n is a, c, g, or t
  modified_base (1051229)..(1052066): a, c, t, g, unknown or other
  misc_feature (1051229)..(1052066): n is a, c, g, or t
  modified_base (1052336)..(1052766): a, c, t, g, unknown or other
  misc_feature (1052336)..(1052766): n is a, c, g, or t
  modified_base (1056960)..(1057877): a, c, t, g, unknown or other
  misc_feature (1056960)..(1057877): n is a, c, g, or t
  modified_base (1059380)..(1060434): a, c, t, g, unknown or other
  misc_feature (1059380)..(1060434): n is a, c, g, or t
  modified_base (1065877)..(1066761): a, c, t, g, unknown or other
  misc_feature (1065877)..(1066761): n is a, c, g, or t
  modified_base (1068413)..(1069246): a, c, t, g, unknown or other
  misc_feature (1068413)..(1069246): n is a, c, g, or t
  modified_base (1071174)..(1071550): a, c, t, g, unknown or other
  misc_feature (1071174)..(1071550): n is a, c, g, or t
  modified_base (1072592)..(1073457): a, c, t, g, unknown or other
  misc_feature (1072592)..(1073457): n is a, c, g, or t
  modified_base (1076054)..(1076893): a, c, t, g, unknown or other
  misc_feature (1076054)..(1076893): n is a, c, g, or t
  modified_base (1087528)..(1087590): a, c, t, g, unknown or other
  misc_feature (1087528)..(1087590): n is a, c, g, or t
  modified_base (1088392)..(1088643): a, c, t, g, unknown or other
  misc_feature (1088392)..(1088643): n is a, c, g, or t
  modified_base (1090704)..(1090777): a, c, t, g, unknown or other
  misc_feature (1090704)..(1090777): n is a, c, g, or t
  modified_base (1090882)..(1090980): a, c, t, g, unknown or other
  misc_feature (1090882)..(1090980): n is a, c, g, or t
  modified_base (1092815)..(1093147): a, c, t, g, unknown or other
  misc_feature (1092815)..(1093147): n is a, c, g, or t
  modified_base (1095831)..(1096832): a, c, t, g, unknown or other
  misc_feature (1095831)..(1096832): n is a, c, g, or t
  modified_base (1097781)..(1098739): a, c, t, g, unknown or other
  misc_feature (1097781)..(1098739): n is a, c, g, or t
  modified_base (1104197)..(1105180): a, c, t, g, unknown or other
  misc_feature (1104197)..(1105180): n is a, c, g, or t
  modified_base (1113669)..(1114694): a, c, t, g, unknown or other
  misc_feature (1113669)..(1114694): n is a, c, g, or t
  modified_base (1117305)..(1118381): a, c, t, g, unknown or other
  misc_feature (1117305)..(1118381): n is a, c, g, or t
  modified_base (1122838)..(1124017): a, c, t, g, unknown or other
  misc_feature (1122838)..(1124017): n is a, c, g, or t
  modified_base (1133186)..(1133539): a, c, t, g, unknown or other
  misc_feature (1133186)..(1133539): n is a, c, g, or t
  modified_base (1134687)..(1134775): a, c, t, g, unknown or other
  misc_feature (1134687)..(1134775): n is a, c, g, or t
  modified_base (1134874)..(1135076): a, c, t, g, unknown or other
  misc_feature (1134874)..(1135076): n is a, c, g, or t
  modified_base (1136492)..(1136570): a, c, t, g, unknown or other
  misc_feature (1136492)..(1136570): n is a, c, g, or t
  modified_base (1136863)..(1137001): a, c, t, g, unknown or other
  misc_feature (1136863)..(1137001): n is a, c, g, or t
  modified_base (1139042)..(1140210): a, c, t, g, unknown or other
  misc_feature (1139042)..(1140210): n is a, c, g, or t
  modified_base (1140304)..(1140706): a, c, t, g, unknown or other
  misc_feature (1140304)..(1140706): n is a, c, g, or t
ggccaattcttcactgcatcgatcttctgagtgtcgacactaatacccgcatcagatatcacatggccaaggaatgctactgagttcagcatgaattcacatttagagagcttagcatataacttatgatcctgaagggtctgtaatactatccgcaaacgagaatacaccagaatgtcatcaatgaatacgatcacgaacacatcaagatagggcctgaatacactattcatgagatccataaaagctgctggggcatttgttagcccgaacgacatcaccaagaactcaaaatgcccatatcttgtccggaaggccgtctttggaatatccttctccttaaccctcacctgatgataccctgaacgcaagtcaatcttggagaaatacttggcaccctggagttggtcaaacaggtcatcaattcttggaagtggatacttgttctttattgtaaacttattcaactgtcgataatcgatacacatccttaacgacccatctttcttccgcacgaacaagactggcgcaccccaaggtgaagtgctaggcctaatgaaacccttatccagcaagtccttcaactgtgccttcaactctcgcaactctgccggggccatcctgtatggagggatagagatcggttgagtgtcaggcaatgcatcaatgctaaactcaatctccctttcaggaggaaggcctgggagttcatctgggaaaacatctggaaattcattgaccacggggattaattgtagagtaggcggcttcgcctccgcatccctaacgcgaacaagatgataaatgtaaccttttgagatcatcttccttgccttaagataggaaataaacctacctttcggcgtagcaatgttccccttccattcaatggcgggttcaccaggaaactgaaacctaaccatcttcgtacgacagtcaacatttgcatagcatgaggccaaccagtccattcccattatcacatcgaaatcaaccatttctaactcaaataaatttgccgaggtttgacgactacaaatcatcacagtgcaacctttatatacccttctagcaatcacagaatctcctatcggagtggataccgcaagtggtttacttatcaattcaggttcaatgccaaacttattagccacaaagggtgtaacatatgataaggtagatcctggatcaattagcgcatatacatcataagaaaacacagacaatatacctgtaacaacatccggagatgactcgagatcttgtcgacctactagagcataggttcgattttgagcaccactcgaactcggcactgaacctctacctctaccacgacctgtcgactgttgaaaaccttgtgctggaggtcgaactgatgaggaagaaccagacacagatccagtcggttgagccataccaccacctcctctgttaggacaatcccgcatcatatggccaggctgtccgcaagaatagcacgcatcggaacctcgacggcacagtccaaagtgggccttgccgcactgatcacaacgaggtgttgggggtctcgtctgactagtatcctatgaattgtgagcctgatgccctcgaactctgacctgaaccagaataggtaaatcgatcataccgaggcctctgaaactgtggaggagcactagctacaggtggcgccgaactcctcgaagactggggcctgatactgcctctgaagtcatcagaataccctgcaaatctcgccctcttatgctggcccctatcctgctccctatctgccctttgctggcgcttacgatcctctagggtctgggcataagcctgaatacgggaaatatccatgccctctaccaaggaggctgttgtgcactcatttatcagatgtggtcccaacccgttcacgaacagatgcaccctatcactcatctcggccaccatatggggagcataccttgctaaagaatcaaactgtatactatactctcgtacactcatattaccctgtcgaaggttcaagaacttatcagctctagctcgtcgtatctcaactggcaagtagtgacgaagaaaggcctcagaaaattccttccacacggctggaggagcgttcggacccctagatctctcccaactatcataccagaaaaccgctaaatcccgtaaccgataagaagccaactctactgcctccgtatcactagcatgcataacccgcaatgtacgatgaacctgatcaataaatgtttgtgggtcctccttggggtctgatccggtaaacactggagggtctagattaataaaatcacgaactctcgcactaaccggtttatcagcagcaccggtattctgcctctgagcctgagcagctaccaagctagtcaacaactgcaccgcactgcgcatatcatggtctgtagtgccagacggaggaactggatgtactgggtgcctcctaatatcctcgggaggagacagagaggtatgagacggcatctcagtctgaggctcactttggcctgctatggctggaggcacctgaatgttaccctctcccacagctgtatcaagccgtttactaatcgcttgcttcctagtcgaaggcatcgctaaaagaaaacaaggtgaatattagatatgaacacttacgactcaactctacgcacgatctagattcaggaagaaggtaacaaccctaggtgtcacatagcctactgattataaatgtggcgcgctacacatccataatctaaactctactagacacggctcatagacaacccctaggacagacttgctctgataccaagtttgtcacgacccaactggagggtcatgactagcacccgggccatacttgccgagcaccaacgtacattttatctaaccttccttattatctttaagggccgacaagatcaatataaatagtagacatggatcatgaacatccaacaatgaaagataatgtcatgaacatacataacatgggacgacaagactgtcaagaaactatatataaggtacgagctatcatgatgccatgaaagactatacaacaaaaatcagccgaaaaggcattctaaaccatacataagtcgatacctgtctatgagcctctaaaagaacataagtgctacaacattgccggaacagggccccgacatacccataaggtctataacaaaaatgcataccaagaccacggcaagtccggagaagggatctcgccaataaccgctgaactggacagcctactgtggtaagggagctacgtctacctgtctatcaggacctgcagcacgacatgcagcgtccacaaataaaaaggacgtcagtacgaataaagtactgagtatgtgaggcaagaaagcataagtaagaacagtaatgtaaacatggatagagaatattcaacctgtgacatctgggtacctctgagggctactgacatgaaatacatgatacatacatatatatacataaacttttaaaacatacgcctttgtgggcatcaccatcatcatatcgtacccggccataataggctcggtaaaacgtactcggccatcatagggctcggtagaatcgtacccggccacgtggagctcggtaaaacccaactgatcagtggttgcacaataggtgccatacccggccaactatagcgcggctcggtagagtaaaatagatacatatagatgatgcatgctggactcattggaatcacattttgaacctttcggagtgacgtaaggtcggtatccttcgtacacgttattaggattaactcttcatcaagaaacttataagaatcaggaactaccaacaacatttataatataagaataagagaagtaacatcaataccaatcgtttcataagaagggcagcaatgtaagtactgctagcttctaagagtagagtatctttgggagctcgttcattacattatgtacaatcggagtcgtacaaaagaatgaaggggatagactcacatcccttctatatactgcccaacctcaagctatgcaaatatcatgactccttagtctacaataagacaaatgacactatcattatcgtttaagcgtcgtaactattatgtatcgaccacaacctattttacgatgaaacggactgcacctcccctatttatatgacttcccacaagtcaatacaatcaccaaacagcccaaacaacatcattaataatcgtattgagcctccaaaacagtccaccaaccaacaacattactaccaagcttttcgatatatatttcacaagttctagcttcaacgacttagctgcaacttggataatcttaaatatatatatagagtaagaggttccttacctttaaaaagaaagaacaactccaatttgaccttaattttccacgaaatatcccttcaattctgccacaagaacaaggaagcgaaactagcaattaattcgggtttttcggcactagaattactttagaagacttgaaatcacctagggttgatattaaaaacttgaaggtgtatttacaggacataaaacacttaaaacaacctcccacacgagctggaacaacacaaaaatcagcaacaacaagacgaacaagaaacttactagcgccacgggattcccgacatttgatttgtgttgtttgccctttgtttgggtcttggatcatgagagaaccttgagagactgtttttagggttataaggtctgaatatactgaaaaataatgacttaaaacggggttgaggtatcttatatatgtccatatgtcttaaaccgcctttgtgggccccatagagagcagcttggtgcactctcgcgaaaacacgaatatctctctattccgagatcgtatcaacaaacggtttaatgcgttggaaactagcctcatagatcttcaatttgataggtagatcaccccataattctaagcacattgggagaaaaattcagtaacatttgacctaaagtttaagtaaaattataaacctaagttgcgacaacttttatcaacttttgtttcataactcgcttgacttcaagacttatgatgcggatattatatgattcaaatacattaaaacaagacctcttgggacagttaatcacctctagtgttacacgaaaatacgggttacaacatccttgattcgtttaacttctaatatttgttaaccactcttatacacccttgtatcgtttaagaccaataggattaacttcttatcatctcaaagataatctcttcttggatttacatcgactaacttacgacatgatctatggtatgcgaatttgggttgtaacaaaaataacttcaactaaggagtagagaccatatgttataaaagagactagggattggagaccctatgtctaaaataacttcaactaggaagtggagaccctatgttggaaaagagactagggagtggagaccctatgtctaaaataacttcaactaggggggggagaccctatattggacaagagactagggagtggagcccctatgtctaaaataacttcaactaggggggggagaccctatattggacaagagactagggagtggagcccctatgtctaaaataacttcaactaggggggggagaccctatattggacaagagactagggagtggagcccctatgtctaaaataacttcaactaggggggggagaccctatattggacaagagactagggagtggagcccctatgtctaaaataacttcaactaggggggggagaccctatattggacaagagactagggagtggagcccctatgtctaaaataacttcaactaggggggggagaccctatattggacaagagactagggagtggagcccctatgtctaaaataacttcaactaggggggggagaccctatattggacaagagactagggagtggagcccctatgtctaaaataacttcaactaggggggggagaccctatattggacaagagactagggagtggagcccctatgtctaaaataacttcaactaggggggggagaccctatattggacaagagactagggagtggagcccctatgtctaaaataacttcaactaggggggggagaccctatattggacaagagactagggagtggagcccctatgtctaaaataacttcaactaggggggggagaccctatattggacaagagactagggagtggagcccctatgtctaaaataacttcaactaggggggggagaccctatattggacaagagactagggagtggagcccctatgtctaaaataacttcaactaggggggggagaccctatattggacaagagactagggagtggagcccctatgtctaaaataacttcaactaggggggggagaccctatattggacaagagactagggagtggagcccctatgtctaaaataacttcaactaggggggggagaccctatattggacaagagactagggagtggagcccctatgtctaaaataacttcaactaggggggggagaccctatattggacaagagactagggagtggagcccctatgtctaaaataacttcaactagggagtggagaccgtatgcctataataaaataaactagggtgtggagaccctatattggaaaagtgactagggagtggagaccctatgcctataataaaataaactagggagtggagaccctatgttgaaaaaaaggactagggaatggagaccccgtgtctaaaaaataaaacacaactagggaatggagaccctatattggacaagagactagggagtagagaccgtatgtctaaaataacttcaactagggaatggagaccctatgtttgaaaatatactagagagtggagaccctatgtctaaaataacatcaactagggagtggagacccaatgttggaaaagagactagggagtagagaccatatgtctaaaaataaaatcaactagggtgtggagaccctatgttggaaaattgactagggagtggagaccctatgcctaaaataaagtaaactagggagtagagaccctatgttgaaaaaaaagactagggaatggagaccatgtgtctaaaaaataaaaatcaactagggaatggagaccctatattggacaagagactagggagtggaaaccgtatgtctaaaataacttcaactagggaatggagaccttatgtttgaaaagagactagagagtggagaccctatgtctaaaataacatcaactagggagtggagaccctgtgttgaaaaagagattagggagtggagaccttatgtctaaaataacttcaactagggattggagacccaatgttggaaacgagactagggagtggagtccctacgtcaaaaataacttcaactaaggactagagaccctatgttataaaagagactagggattggagaccctatgtctaaaataacttcaactagggaatggagaccctatgtttaaaaagagactaaagaatggagaccctatgtctaaaataacatcaactagggagttgagaccctatgttggaaaagagactagagagtagagaccatatgtctaaaaataaaatcacatagggtgtggagaccctatgttggaaaagtgactgggaagtggagaccttatgcctaaaataaagtaaactaggtagtggagaccttatgttgaaaaaagagactagggaatggagaccctatgtctaaaaaataaaaatcaactagggaatggagaccctatattggacaagagactagggagtggagaccgtatgtctaaaataacttcaactagggaatgtagaccctatgtttgaaaagagactagagagtggatatcctatgtctaaaataacatcaactagggagtggagaccctgtgttggaaaaaagattaggaagtggagaccttttgtctaaaaataaaaatcaataagggagtggagacccaatgttggaaaagagactagggagtggagaccctatgtgtaaaaataaaaaccaactagggagtagagaaccctatattggaaaagagactagggagtggagaccgtatgtctaaaataacttcaactagggaatggagaccctatgtttgaaaagatactagagagtggagaccctatgtctaaaataacatcaactagggagtggagaccctgtgttggaaaagagattagggagtggagaccttttgtctaaaaataaaaatcaacaagggattggagaccctatgttggaaaagagactagggagtggagaccctatgtgtaaaaaataaaaatcaactagggtgtggagaaccctatattggaaaatggactagggagtggagaccttatgtctaaaaataaaatcaacttgggagtggagatcttatgttggaaaagagaatagggagtggagaccctatgtataaaataacatcaactagggagtggagaccctgtgttggaaaagagattatggaatggcgaccttatgtttaaaataacttcaactaggtattggaaatccaatgttagaaaagagactagggagtggagaccctacgtctaaaataacttcaactaaggagtagagaccctatgtcggaaaagagactagggactggagaccctgtgtctaaaataacttcaactagggaggggaggccctatgtttgcaaagagactagggagtggagaccctatgtctaaaataacttcaactacgtggtggagaccctatgatggaaaagagactagggagtggagatcttatgtcaaaagtgacatcaactagggagtggagaccctatgttggaaaagagactaaggagtggagaccatatgttggaaaagagacttgggactagagaccctatgtctaaaataactttaactagggagtagagaccctatgttagaaaagagactagggagtatagaccctatgtctaaaataactttaactagggagtgaagaccctatgttggaaaagagactagggagtaaagaccatatgtctaaaaataaaatcaactagggagtggagaccttattttggaaaagagactagggagtagtgaccctatgcctaaaataaaataaactagggagtggagaccctatgttggaaaaagagattaggatagagaccctgtgtctaaaaaataaaaatcaactagggagtggagaccatgtgttggaaaagaaactagggagtggagaccctatgcctacaataaaatcaactagggagtgcagaccctttgttggacaacgagactagggagtggagaccatgtgtcaaaaataacttcaactagggagtggagaccctatgtcttaaatgacttcaactagggagtggagaccagatgtctaaaataacctcaactagggagtggagaccctatgttggaaaagagactagggagtgcacaccctatgtctaaaaataaaattcaactagggagtggagaccttatgttagaaaatagactagggagtggagaccctatgcctaaaataacttcaactaaggagtggagaccctatggtggaaaggagactagggagtgcagaccctatgtctaaaataacttcaactagggagtagagactctatgtttgaaaagagactagggagtgaaggccctatttctaaaataatttcaactagggagtggcgaccctatgttggaaaagaaactacggagtggagaccctatgtctaaaaataaaaatcaactagagagcggagaccctatgtttgaaaagagactagggagtggagaccctatgtctaaaaataaaaatcaactagggagtggagaccctatgttggaaaagtgattagggagtggagcccctatgtctaaaataaaatcaactagggagtggagatcatatgttggaaaagagactagggagtggagaccctatgtctaaaataacgtcatctagggactggagaccctatattggaaaaggagtctaggtagtagagaccctatgtctaaaataaaaccaactaggtattggagaccctatgttgttaaagagactaggtagtggagatcctatgtctaaaatatcatcaactagggagtggagaccctatgttggataaaaggactagggggtggagaccctatgtccaaaatcaaatcaactagcgagtgaagatcctatgttggaaaatgcagctagggattggagaccttatactaccatgatttttaattttctttcttttcattttcatttttttaagagaataagtaaaatgcgggaaaatatttggagaagacttcccttttgaagtgattgttgttgcagagctattttagtctccgcgtggtttctttttggttgcacctgcttcttgcaaggttgctttggattgcacttgtttcctggttttttaaacaaagaataaatttttagtttgaaatggtggttggttttgcggccttgggtgtttcagtcacttgatcttggttggcttctttgatgataatttcacctgcaactagttgtttcctgaataccacttgcatttctggccctggagaacctttggcttttccaacctttaccatgacggctagtcccgtgggacttaaccttttcaactttattttgtatttgtggaatttcactttcgactttattcttctaaagctttcaatttcagatcattggggaacctttggattttcacattttcccattacacttggtcgcgtgggacttaaccctttcaacttcattttgcccttataggcactcccttttgatttccttctttcaaagttttcaattttaaagcatcggccaatcatggccagtcggggtcgattcaatatccttgccgaggctgggcgccttttgaatatatcagcttgcttcaaacaggaaccctgtaaatcggttttgtcgtcctttctttgccttattttggagcaaagttagaccgaaagggattcgaagaaaaataagcaacggagtagaaaaaatgagtttaaaacaagaggtgtccctttcaaggaatagaaggacggacttatctgggagtacatgcggacgtcaatgaacatgacatgccttttgggctggatgcctgatctgtgtaaactgtccgactcttagaaacgcatcacaacttttgccttgaaaaccgagaagccttgcccagaactgtgtcgatgccaatggatgtaaggatcctcttttcgatcaatggcgccttttgcgggttttcaccaattgacctttctcacttctcttctcaccatcgccttatagttctctttgcgagttttcactaataagactctctcattttagttctttactcaccatcaccttaaagtgcccgtgagggttttcaccaataagactctctcattttagtttctttcattttgacgtctccaggaccaaatatctgtgacctctgattcttgatcattcttgcctattggtcggaaggacttgaaagggatttgggtaaacgaattttggattgaattaaaactttggaacctttcgggtgaaatcatcgctaaaacattataattgttgccccagtttcaacttttgggggaatgtggatttttattttggtgtgactgaaccccagagagaggctgcctacgtatccttttggaatcaagtcgaacgtagttcaattaacatgaactgttttttattttcttttgtctttttgtctattttgttttctctctttccttttccttttttttctttttcctttttttctctttcttgtttttttttcttttcaataactccttcaggatccaaagagggtaatcaaaaaaaggtaactggctcaaagggttggcaaaagggttaatggtgtttgggtagcgagaatgaaagccttcttcatcccaaccggaaaacattaatgctatatagagtatcaaacatagtaccttttgactgcacatgcgttgacagttgttttaggaacatttcctttaatgtttcccaagtacaacgctctcttttggaagtactctcgttacaatgtatggacctttccaatctgtagccaatttttctttaattgttctaattctttattttatttccttaaacttatcttcattgcattctaattcttgattcattatttcgaagtctgacagcattttagtatctgggcataaaatccgcaaacatgtcatattattgaaatcttcatttaacagaactgaaaaaagaataagagaagtgacagagtcaagaaaagagacatggacgatgaaatattgattcaattatttgaattttaaagatagaagggtttacaatggaaagtaagacaataaaagtaaaacatccggattacaccctgaaataattcggacgcagaaagaatagtaagaccggctactgcgactcccatttgacagggaactttcaggtttggcgactattttttggcttttctcctgtctcggcaatggttgcaatggccttcagtgccagatcaaattccccatcatcacagatcattccaactactggcccattggtgtgagtaggcagaggattgttcgtcatattaggagtctcttcttccttgagaactattgacttgacctcaatgaggtcctccactgctcttttaagagtccaacaatcttcagtatcatgtctcactgcttcagagtgatattcacatctagcataagctcggtgcgagggggactcggggttcggccagttcgaggccactggctgcaacacacctagcatgattagcttttgaaacaaacttaaatacaattcaccaataggggtgaattgattccttctgaggggctctcttgggcaaggattttattagggaacatttggttggggattatatagagcttggtaggaacgggcatttatgggaggtagagctcgattttgtgtataatgatgtggccgcgtgtaaggttgcgcattcatcaccgcatagtgaggcggttccacggcgtatgcagcatcatgatgagggtaataatgttgcggggttctagacgacatatatgattggttgaatgatctgcgggactcctcgagctcgaagccatcatggctccctcttctctcatgtttctattcatcaaactccccaaaacattctgaacggcctatgatgtggccttaaaggcagcttgactcaagattcagcctgttttcaaaccattttcgaccatctctccaattttgatagcctcggcaaacggattacccatagcggacatcatgttctggaagtagtccgcctcttgggcctgtaggaagacaatagccatttctgcttcgtccattggaggctttaccctggcggcttgctcgcgccatttgacagcatattcacgaaaactttccgcgattttctttttcaaattggacaaagagttctctttttttggattttttcactcttgctttctttctttctttcttttgttttttgctctttatttttctttgttatttttgtcactcctttatttctttttctttcttctttttttcactcgatttatttaatggctatgatcgaatctgatggggattgcctacgtatcatgacgccgcatgaatacgatcattacatagttcaggattaccgggaacaaagtacataagctagctcttttttgatttctttctttttgatttgctctttgggaattttttaaaagaagacttcttaaagaataaagaaaatattcttggatttcgacttgttctttggggaattttgacataaaggacttctaaagaaaaaagaaaatatttttgaattttgacatttttgcctttgaatttccaaaagaacgacttctaaagaagaaagaaaatattttagattttgatttaaattttttttttgaatttttgggagaaagacttctgaataaggaaaaaaaatatttttggatgttgatttgatttgtttatttttttttctcgaatgaaaaacttctaaaaagaaagaaaaatatttttgggtttaaatttttttttattttggattttctaagaaaagacttctaaggaaggaagtaaatgaaaatattttttggatttataaaaattggggctagaaccgatgaggtttgcctacgtatctcacatccggtgagaattagacctgcgtagttcggtcaattttgacacaacaggaaaaatacgactttttgaaaatattggctcattttgaaatgacttttcttttcttttttttttttcaaaatttcgatagagttttaaggttttcaaatacctggatttttcagaaccgggtaaattctctctctcctacctcactcttttttttcttgattttctttccctattctagaagctggtcaacatgcaatccgaaacaatcatatgcacaagtagcacgtaaaatgcatcatgatggtcttttatattgggtacacctgtcctagacggacccaatccctgtgttgagtcctcaaagtcaaatgcacgtgatgtaaacaaacgttcctactagggatctggcatgatgctatgttattctagttttaaatcctggggtatgttgttctagacttggcttacccaagcggacaactagagccgaggggggaagcgtatcgggaatatagaagcttcatcggctttgcatcttgtccgatcctcgttctaaaatcagggatatgactctaacagaaaagaaaccacgcgaagcgcacgcttcccagaagatttagaagacttagagagaagaagggtggcgtaacagttttatatacagttcacagaatatcaaagcggtaaatgagaagcaattagtacattaggcccaaacatgtaatatgagacaatcacatgaaatccaagcataacaattattctaagctcgaattctgaaccctaaaccagaagttttgggttccattccccagcagagtcgccagaggtatcacacctcatttttcctgagggataggaaaatttttccaattaaagtgatattattcaaaataggataatttacttaattcagagtcgccacttgggataattattatggtgtcccaagtcaccgatttattttagaatcccaaatcgaggaaattgactctatttatggtctgcgaacatagaagaccgggtagggaattctgttaacccgggagaaggtgtgacgcactcctgagttctgtggttttagcacggtcgcttaacaattaatacttggcctaattatctaaaaaattaagacttatgtgaattaacttttctataccgcatttaattatatatttaaccatttttaatatttataaaatttatttgaacaagtcgcgatgtcgcgcacttgttgttttttgtacatattgtgaatcgctccaggtgaaacgcacctgcgatttataatatgcttatttttattattatttgaagctatggtcaagtcgcgtgaaacacgcacttgaattggggttacgtatcatgactatgccacgggaaccgtacctataaccacgggaactgtttatgagttgcttattttcctaaggtttgagattgttgtgaggccatgaattatggaagattattttgggagaaggataagagagtatattcnnnnnnnnnnnnnnnnnnnnnnnnnnnnnnnnnnnnnnnnnnnnnnnnnnnnnnnnnnnnnnnnnnnnnnnnnnnnnnnnnnnnnnnnnnnnnnnnnnnnnnnnnnnnnnnnnnnnnnnnnnnnnnnnnnnnnnnnnnnnnnnnnnnnnnnnnnnnnnnnnnnnnnnnnnnnnnnnnnnnnnnnnnnnnnnnnnnnnnnnnnnnnnnnnnnnnnnnnnnnnnnnnnnnnnnnnnnnnnnnnnnnnnnnnnnnnnnnnnnnnnnnnnnnnnnnnnnnnnnnnnnnnnnnnnnnnnnnnnnnnnnnnnnnnnnnnnnnnnnnnnnnnnnnnnnnnnnnnnnnnnnnnnnnnnnnnnnnnnnnnnnnnnnnnnnnnnnnnnnnnnnnnnnnnnnnnnnnnnnnnnnnnnnnnnnnnnnnnnnnnnnnnnnnnnnnnnnnnnnnnnnnnnnnnnnnnnnnnnnnnnnnnnnnnnnnnnnnnnnnnnnnnnnnnnnnnnnnnnnnnnnnnnnnnnnnnnnnnnnnnnnnnnnnnnnnnnnnnnnnnnnnnnnnnnnnnnnnnnnnnnnnnnnnnnnnnnnnnnnnnnnnnnnnnnnnnnnnnnnnnnnnnnnnnnnnnnnnnnnnnnnnnnnnnnnnnnnnnnnnnnnnnnnnnnnnnnnnnnnnnnnnnnnnnnnnnnnnnnnnnnnnnnnnnnnnnnnnnnnnnnnnnnnnnnnnnnnnnnnnnnnnnnnnnnnnnnnnnnnnnnnnnnnnnnnnnnnnnnnnnnnnnnnnnnnnnnnnnnnnnnnnnnnnnnnnnnnnnnnnnnnnnnnnnnnnnnnnnnnnnnnnnnnnnnnnnnnnnnnnnnnnnnnnnnnnnnnnnnnnnnnnnnnnnnnnnnnnnnnnnnnnnnnnnnnnnnnnnnnnnnnnnnnnnnnnnnnnnnnnnnnnnnnnnnnnnnnnnnnnnnnnnnnnnnnnnnnnnnnnnnnnnnnnnnnnnnnnnnnnnnnnnnnnnnnnnnnnnnnnnnnnnnnnnnnnnnnnnnnnnnntattgttataaatttattaggggggaaatggactaactaacatgacatagtacctaaacccaaattcatgtagctttttaaatgaccccactgtcccactagataaggaacaaactcaaacaagtgaaactagaatatcaactaattgtctaaacggatcagatggccaagaaattcaaaattccacatcaattaagtcaacaactcggctcaaaactttgtctaattaatttatgactaaagtcacttaatggaattacatgtcttaaacctctttttaattaagtccaaatccttcttagtctagtaccgataaatcttactgtctcatccaatataaacatatatcaacaaaattgcttttgtatttaaagcaacaaacattttccatatatgtttagttataattagatctactgattcaaaggcattaagttgacaaaagacaagaaaacaaacaatcatcacatttaaaaaatagaatattcacatggctaaaagacgaagaaataaacagcatattaaaaattggtgagggaagtaaaaatataccttgtattgattggatccaaactttaaaattgctgctgcgcaacaatcaaaccaagagcagcgactacaactgagaacctccaacggcacaaccttgtcggaagcacgaaattgactgaaaagtggagaagtttcagggttgtttcttagctgatgtttatggggttgaaaggttatggaggaaactggtttgttgggtggagatgggggattgtttcagctgggtttttcaactggttttggtagcattttttgagctgatttttgtggaatgaagctggttttagagcttggtttcaggtgtgttttggtgttgattttgggtggaaaaagggcagcattttggactgttttacagctgattttcgctgctcttcctagctgttttcacagcttgttttgctgctctttagtgtggattttgaggtgtttcatggtgtattttggggtggagatgaaatgattttttgggggtgattttagtgatgttttatgggtgtttttaatggctaaaaattgctcccgttttttgaacttttcttggatgctttggaggagttttggtcgaggaatgaggctaggagaagaagaggtaggcgctaggattttcctccgttggtctctgtttttcatcccctttgtgcagtgtgtgtgcgctctataactgatgtgaggaagtggggatgatttatgagggagacgtgagggagagtggaagtgagtgtgtgctagtgtaaagtgatgtgagggagttggggggaaaagggataaagtgagtgtgtgctagtgtaaaatgacgtgagggagttagggaaaagggggtaaagtagtgctagtgtaaagtgacgtgagggagttggggaaaagggataaagtgaggtattggtgagataatgggatataattttcttaagtaacacttataaaaggtgaaataagagctaaaatatgtagattaaacttaaaatatacttacctactaaaaagtgggagaaaattcaaatattgtaaaaaattaggtgctcacaattattacaataataaaaatcaaaaagcagaacatacacgtgcttaaaattgcagcttcgcgaaaattccaaaaagaaaataaaggtactgcagagtctagagctacaatttgaagggcaagcgtataaatagacgtaagcaataagccctagtaagaacaagttcaagaaactattcattcaaaacctaattagggcaacaaaaagaaatgaatccagctgataatgcaaccttctctttctctgatcttgattttctggactctattgaccaccatcttctgattaattccgatttttcgaacagtttttcgccgatgagttcgagcaacgtcgcaactcctaatagtcnnnnnnnnnnnnnnnnnnnnnnnnnnnnnnnnnnnnnnnnnnnnnnnnnnnnnnnnnnnnnnnnnnnnnnnnnnnnnnnnnnnnnnnnnnnnnnnnnnnnnnnnnnnnnnnnnnnnnnnnnnnnnnnnnnnnnnnnnnnnnnnnnnnnnnnnnnnnnnnnnnnnnnnnnnnnnnnnnnnnnnnnnnnnnnnnnnnnnnnnnnnnnnnnnnnnnnnnnnnnnnnnnnnnnnnnnnnnnnnnnnnnnnnnnnnnnnnnnnnnnnnnnnnnnnnnnnnnnnnnnnnnnnnnnnnnnnnnnnnnnnnnnnnnnnnnnnnnnnnnnnnnnnnnnnnnnnnnnnnnnnnnnnnnnnnnnnnnnnnnnnnnnnnnnnnnnnnnnnnnnnnnnnnnnnnnnnnnnnnnnnnnnnnnnnnnnnnnnnnnnnnnnnnnnnnnnnnnnnnnnnnnnnnnnnnnnnnnnnnnnnnnnnnnnnnnnnctagttcaagttttggcagctgccttttggatgaaaacattgaagaaacaacaactcccgaatctcaatccaagcccgaggagcaaacgcagggcggaaaggcggcgcgtgagagaaacacgaatcaagattggaggcggtacataggagtgagacagcggccgtggggaaagtttgcggcggaaataagggaccccgacaggagaggtgccagactgtggctaggaacttatgagaccccagagtaacgcttacgatcaagccgctttcaaaaggtatatgttctctaagaagctgaaaatattaactctaattctttactttataaagctatcaataatttcaactcattgcaagtaaatctccattctgtaaacgtttaaccatgtcaatgaaggagtataaagtattcaatgtttaatgatttgcaaactgatattcggcaatcaattccggtttgtaatgatccacattagtttctcatttcaataatatccggtcttctttagcaataaagaaaaataacaacaacaacaacccagtataatcccactagtagggtctggggagggtagtgtgtacgtaaaccttacccctaccctgggatagagaggctgtttccaatagaccctcggcatccttccctccaagaactacccacctttattcttggggtgactcgaactcacaacctcttggttggaagtggaggatgcttaccatcatagcaatccagggtgaccagtgtaggcttcctcttcacttctgcaattttgagaaacaaaaaaaaccataatcatatggaatcttctctaatattgcacatgcatgtctgacaaatttcaattattgaatactttttaattcccgtatgatgctgtacttgaaattatataataatcaaggttccttttgtactctttttaaattatcggatgtgtttttctaacaatcataaagccacggaggtactaattgctaagaagttgccgaacaagttttaggatattcgcaaaaagtgtcaaagctcccccatataaaattaaagtcgatgcagctcgtctttaattaacagatatttaagtgaatnnnnnnnnnnnnnnnnnnnnnnnnnnnnnnnnnnnnnnnnnnnnnnnnnnnnnnnnnnnnnnnnnnnnnnnnnnnnnnnnnnnnnnnntgttatatatgatgctccaccaactggaaacgaaaatgagaaatcaaataggccttgaaatataatcatgaatttgctgatattctaaaggtcgtcccagtaaacaaattataaagagaagaatccatagtaaaaatttatttaagcattaaatacatcttcaacgaaagatgagccgtaaaagacataagtagccacacctctttaattttgatttctatttcctgtgtaatatcgtgtgctagtattatatcctcacgagttcacatttcgaaaatgtactggacatttctttcttgaaatggaaaattaaatgcttctaaaatttgacagctcatgttatcagaaaaccaaagaggtttttgagaaaaagctatacatatactaggttttttctacaaataaatatatatctctgttttaaaaactaaaacagagagaataaaatgttaggataataaaaactaaaaagcataacatacatgtgcttaaaatggcacctgtatagaaattccagaaaaaaaataatgatggtaggggaccagagctacagttataggccaagcgtataaatagacgtacagtatcaactgttccattcatccagaattaataaaccctagtaattagagaaagtgcaagaaacatttatttcaaaactctagagaaaagaaaatgaatccagcagatataaccttctctttctctgattttaatctccttgaatccataaagcaacatcttctaaatgattcagatttttctgaaattctttcgccaatgagttcaagtaacgcattgcctaacagtcctagctcaagttttggcagctccccttcagcagaaaatagcttcgaaacctccttttgggatgaaaaatttgaggaaacaataccaaatctcgaagaaaagtgcgagtccgaggaggaaacgaaggggaatgtggtggcgcgtgagaagaacgcgccgcaagattggaggcggtacatagtagtgaaacggcggccatgggggacgttttcaccggagatgagagaccccgataggagaggggcaagactgtggttaggaacttatgagactcctgaggatgcagcattggctccgctttcaaaatccgcgnnnnnnnnnnnnnnnnnnnnnnnnnnnnnnnnnnnnnnnnnnnnnnnnnnnnnnnnnnnnnnnnnnnnnnnnnnncgctcaattttcctcacttaattggctcaaacatgcctaagctggctagagttacagcgaggcgtagtcgtacacgctcacccgagccatcgtcttcttcgtccacctcatcatcagtaaatgtaacaagaaaaaggaaaatagatgtgataaattccatagccaaagctaaatatggttggaacctccagatgttaatataactatatttggaagggtatatatttagtgttttagtattagaataacgtttttaaattttttgacactacaacattttagttttattgggtggccaaaacaagcgtaatctttgacctaagggcacgttttttaactattgccttacaagccacgcttaaaagcgtggcttatttgataacaaagacaacgcttactacaccccatatgtaatatttttataccttacagctaagctgtccaacgggacgggaggatatttagccgggacagtggcaagacgggcctaaacgggacgaaacggtaggcccatcccatcccgctaccgaacgagaagggacgggacggtttcgcggaccttaagtgggctgatttttaaaaatatatatttatttaaccattaagtttggcaacgtctagtttttttacttatttaataaacttaaaacttaataaattataagaaaattaggaaactaagtaaaaaattataaaatattaaaaaaagacttgtaatgaaatattttagtaattataatagagttgtaatttatttaatataatttcaagccattaagtnnnnnnnnnnnnnnnnnnnnnnnnnnnnnnnnnnnnnnnnnnnnnnnnnnnnnnnnnnnnnnnnnnnnnnnnnnnnnnnnnnnnnnngaattcaaagcttagagccttttattttattaatagaagtttcaaatttcacatacaaatataattcttttgaaaagcacataatctacgcagccaccttctaggaagggttctatttgatctaggcctcttagtagccaattataaattatcatactaatatttgtaagctcatatatagtttcgttgtaacttatctataatttctctcggacattgtctgttgttgtaaaaagttagaacccccgccggatccactaggagcgccagtaccggtgctaggatctgtaatttttccggcttctatttgagcttgcatccataaagaattgtgctccttaagtaagtgcctggctaacccccccgtcccaccactagtcttgtgtacaaatcgttgcttacatttttcacgtatagcacgttgattgactttatcatgtttaaaaaattttcatacaagtgatgtttttggcacgttcacccttaggcttgccccttacaggtggtaccgggggtaaagctccagaccgagattgactctgagttagaccttgtgttgcaggactagtgggtgtttcatctaattcttcttcctcattttcttcatcctcaataaaaatatcattgccaaattgtctttgtaaagtttcatgnnnnnnnnnnnnnnnnnnnnnnnnnnnnnnnnnnnnnnnnnnnnnnnnnnnnnnnnnnnnnnnnnnnnnnnnnnnnnnnnnnnnnnnnnnnnnnnnnnnnnnnnnnnnnnnnnnnnnnnnnnnnnnnnnnnnnnnnnnnnnnnnnnnnnnnnnnnnnnnnnnnnnnnnnnnnnnnnnnnnnnnnnnnnnnnnnnnnnnnnnnnnnnnnnnnnnnnnnnnnnnnnnnnnnnnnnnnnnnnnnnnnnnnnnnnnnnnnnnnnnnnnnnnnnnnnnnnnnnnnnnnnnnnnnnnnnnnnnnnnnnnnnnnnnnnnnnnnnnnnnnnnnnnnnnnnnnnnnnnnnnnnnnnnnnnnnnnnnnnnnnnnnnnnnnnnnnnnnnnnnnnnnnnnnnnnnnnnnnnnnnnnnnnnnnnnnnnnnnnnnnnnnnnnnnnnnnnnnnnnnnnnnnnnnnnnnnnnnnnnnnnnnnnnnnnnnnnnnnnnnnnnnnnnnnnnnnnnnnnnnnnnnnnnnnnnnnnnnnnnnnnnnnnnnnnnnnnnnnnnnnnnnnnnnnnnnnnnnnnnnnnnnnnnnnnnnnnnnnnnnnnnnnnnnnnnnnnnnnnnnnnnnnnnnnnnnnnnnnnnnnnnnnnnnnnnnnnnnnnnnnnnnnnnnnnnnnnnnnnnnnnnnnnnnnnnnnnnnnnnnnnnnnnnnnnnnnnnnnnnnnnnnnnnnnnnnnnnnnnnnnnnnnnnnnnnnnnnnnnnnnnnnnnnnnnnnnnnnnnnnnnnnnnnnnnnnnnnnnnnnnnnnnnnnnnnnnnnnnnnnnnnnnnnnnnngaaaaaataaagttttatcaacataagtcatttcatctatatattttctaattcttggagaaggattaggattaggattaggattactactactatcacctttactactttttttaaataggccaaatacatttttaggtgccataatttaaatatgaaatcaaattaaaaaagttaacacaaaaattaaacacacaaatgaaatacgaaattaaatttaaaaagttaacacaaaaattaaacacacaaataaaatacgaaaatagaacaagtaaagtaaacacaaaaattaagcactaaatttgcaatggaggtcgttgcccaatggctatattacaataaaaacaatttaaaaaacacgtgggacaggcgggacgggacggaaacgggataaacaggacgggataaacgggacgaaatgggaatcccatcccatcccttgtaccgtttaacgtgggcccatcccgtttagatttaagtggtccgtcccgtcccgttggacaaccttacttacagctaggagtggcaaacgggcgggtcggatcggatatgaatcgggtcaaaaacgggtaatgaaaaaatggataaattatccgacccgacccatatttaatacggataaaaaacggattaaccggcggataatatgggcaaccatattatccatcacttcttgaatatgatcacttttgggagaattcctagtctcccaaacttgaggaaccctcattgttctctttacttgtacgctgcaaagtatattagaagaaataaataacaaacatcaatacaacaacaacaacaacaacaacggcgatcgagtaaaattccactagtggggtttggggagggtagtgtatacgcagaccttacccctaccccgaggagtagagaggttgttctctttattaggagtataccttacccctaacaaacatcaatgtattctaaaaaagtatgtaaagaaatgaaagtcatattttttacaaaatatcgaataaatattactgatgccacacacactcttgcaaaattaataggtctcatcagatgcctccaattttattttttcttgttttcataatttaatttgcacatggcctagcaccaaatttctagaaaatgatcaagactcatcgccgataagacctacttcctcttcatttttttgcaaatttctccttctccttgtcttcttccaatcatatgtgaagtgttaagaacttccttcaaagacaactagatcatggatttgtgcataggtaatttaccatttccttgttgttgaaaagactccttagattgagttaacctttatctactctttccttctcttgcatttgatattgtgggcataagatgcttccatttatgagttactggtgcttgctctttcacaactctatactccttatcatgagctagtttttcttttttaatctgaaattgcttggccaattcagcacttgatcgaaactgaaaatcaaaacctatcttcttcataggactttgagctttgattcaaaccctttttctttgctcctcaatacattctcataaagaggaaaaatattaattagaaaataccgaaatacagaaagcaaaagatgtcgaaacaatgtgcagaaatgcagaaacgttctgaagatatgcaaaaatactgcagaaatgcagaaccgctatgcaaaaatgcagaaacactgtgcagaaagcaaaaaattcagaaacgcagcagaaacgtagaaattgccggaacgccatgcgtaaacgcagaacactgtgcaaaaatccataaataatttgtagaaatgtagaaacactatgcataaatgcaaaaacactgtgcaaaaatacagaaattgtcgaaatgatgtgcagaaatattgaaaatgcagaaaaattgtgcagaaacgcaaaaaatactgtccagaatgcagcaatttccgtaacgcagtgcagaaacccagaaaaaatgtgcagaaaatacactattcagaaaatgcagaactgtagaaatactacgaagaaataccgaaacgttgtgcagaaatgcaaacacactatgcagaaatgcaaaaattgctgaaatgctgtgcagaaatgcagaaaaacttcgtagaaacgcaaaaaccattgtccataaatgcaaaacattccaaaacgctgtgcagaaatgcagaaaatacagaaaaactgtgcagaaatgcaaaaatattgtgcaaaaatgcaaaaattgccgaaacgctgtgcataaatgcagaaaacttagcagaaacgcaaaaaacacagtccagaaatgtagaaatttctgaaacgctgtgcaaaaatgcagaaacgcaaaatgtcaatgactaacctttcaatggccatataagagcatcttatttatttggctatgtgaattaaagacattcaattagcagataactagtcgaacaaactcagaatacaactcctagcctaaaatttgatactctctgaagaagaaaacctatataaacacacaacataagttgtaactttattaaataattattttgtagcactatgtctgctcctcctagagagagtgaagaatagttgatcaaacaaagttatgcccaatttattttctcgaaatctcacctatttttcccttgataacgaacaaataatcannnnnnnnnnnnnnnnnnnnnnnnnnnnnnnnnnnnnnnnnnnnnnnnnnnnnnnnnnnnnnnnnnnnnnnnnnnnnnnnnnnnnnnnnnnnnnnnnnnnnnnnnnnnnnnnnnnnnnnnnnnnnnnnnnnnnnnnnnnnnnnnnnnnnnnnnnnnnnnnnnnnnnnnnnnnnnnnnnnnnnnnnnnnnnnnnnnnnnnnnnnnnnnnnnnnnnnnnnnnnnnnnnnnnnnnnnnnnnnnnnnnnnnnnnnnnnnnnnnnnnnnnnnnnnnnnnnnnnnnnnnnnnnnnnnnnnnnnnnnnnnnnnnnnnnnnnnnnnnnnnnnnnnnnnnnnnnnnnnnnnnnnnnnnnnnnnnnnnnnnnnnnnnnnnnnnnnnnnnnnnnnnnnnnnnnnnnnnnnnnnnnnnnnnnnnnnnnnnnnnnnnnnnnnntcaaaatttcaaaaaggtactgtcacgacccaattttacctgcaggtcgtgatggcgcccaacactacagctaggcaaaccaactaataaattaagaatacattgataaaatttaaaaccaagaaatcccaaactctaccaacgtgtgtgccaagacctggtgtcataagtgcatgagcatctagtagatgatacaaaactccaaatactgtctgtaatataagaagagacactggtagctgcagaacggcccagaaaggcagctcaccactatgcctcgggatgacgtggatatgtgatgataggtcctccactagtacccgtctcagatcctgcacaaaaagtgcagcaagtgtagtatgagtacgtaaacaacgtgtacccagtaagtatcaagcctaatctcaaagtggtagagacgagatggccgactttgacactcactatgggtcaataataataactgaaataaactaggatatttaaatcaacatgatttacagaatttacaataatttatttaatcagcgaaaataatcaaattccttcaaatgtaacaattctcaatacattaattagattccttcaattcaaataatttctaatttatcaattaaatctcatttacaggagtaacaattaattccttaacaagcaagaataataattaattacattccaaggattttccaatttatcaattagcttcacaagctgaaataaattattaaagtatcgtgtaattattattattaagcacgatttctgtcgaggacgtacggcccgatccagagtgtcgtgtacactgccgagggacgtgcggcacgatccatagatgcatctatcctgccgaggcgttcggcccgctccacaagaaaggaggacattttcttatgtacctccggaaggagagtatatttattataagataaattcgggaggaagaataatttatttaaacaattaattaatttaaatagaaaaccaagcatatgaggttttcatcctttaatatctttatctaacaattcacaatatattcatatatatcaattaatattaattaatcaaagaatataatttacacaagtaatgcatgctttgagtcctaaactacccggactttagcattaatagtagcgacgcacggactctcgtcaccttgtgcgtacgtagcccccaccattagcaacaattatttaattttaatcacctatgaggcagtttccccctcacaagagtagccaagagacttacctcgtcttgctccaatttaaccccctagaaggccttttccacgattatccaaccctgtccggctcgaatctagccagaataattcgatacaatcgggggggggggggggggaagaataatttatttaaacaattaattaatttaaatagaaaaccaggcatatgaggttttcatcctttaatatctttatctaaccattcacaatatattcatatatatcaattaatataaattaatcaaagaatataatttacacaagtaatgcatgctttgagtcctaaactacccggactttagcattaatagtagcgacgcacggactctcgtcaccttgtgcgtacgtagcccccaccattagcaacaattatttaattttaatcacctatgaggcagtttccccctcacaagattagacaagagacttacctcgtcttgctccaatttaacccactagaaggccttttccacgattatccaaccctgtccggctcgaatctagccagaataattcgatacaatcactaaatattataggaatcaattctataagaaaatactacatttttagtaaaaatcccgaaattaattaaatattcgtctgtgaggcccatatctcggaatccggcgaaagttatgaaatccgacaacccattcaattacgagtccaaccatactagttttactcaaatccgactccgaatcgataccgaaatctcaaaaattcgcttctatgagatttctaaattttttccaaatttcaatctcaaaacactaatttaatggtgaaaacaatgatatatttgtgtatatggaccaaatccgagttggaatcacttgccccaaatgtctttccttgacaatctgtcaaaatcgcctctcctccagctccaatttgttaaaaaggcgaatgagacgaatgctctctttttataaaactacccagacagcctttgattgtgaccctcgatcttgggtctcgatcctggccctcgagccttgcctttgatcatggccctcgagttggaccttcgatcatggcttcgnnnnnnnnnnnnnnnnnnnnnnnnnnnnnnnnnnnnnnnnnnnnnnnnnnnnnnnnnnnnnnnnnnnnatacacaagctcgagcctgagcctcgtcaaccctgggctcgatacctgggcccgatatctgggctcgatcacaacctagaatgtccaacagaaaaggaaatattgcagcagctttttaagtccaattttttatccgttaaccatctgaaactcacctgaggccctcgggacctcaaccaaatataccaacaaatcctaaaatatcatacaaacttagttgaacctctaaatcatatcaaacaacgctaaaaccatgaattataccccaattcaagcttaatgaaactaaaatattttcaacttctacattcgatgccggaacctatcaaatcgagtccgattgacctcaaattttgcacacaagtcatacatgacataacggagctgtgaagattttcagaactggattccaaccccgataacaaaaagtcaactccccggtcaaacttccaaactttaaattcctatttttgtcatttcaagcctaatttcactacggacttccaaataaaannnnnnnnnnnnnnnnnnnnnnnnnnnnnnnnnnnnnnnnnnnnnnnnnnnnnnnnnnnnnnnnnnnnnnnnnnnnnnnnnnnnnnnnnnnnnnnttcgatcaagatcctaagtctaaaatcaacatacggagctgttagaatcatcaaaattctatttcggggtcgttttcacataattagacatccggtcactatttgaacttaaacttttaaattttttatcaaaattccatatctcgggctagggacctcggaatttgattccaggcatacgcccgagttccaaatcacgatacgaacctaccggaactgtcaaaacattgatccgaatccgtttgctcaaaatgttgaccaaagtcaactcaattgagttttaaagctctaattcacattttaatccatttttcgaggtcttagaacacataattaattattaaatttaaagatgacattttgggtcatcacattctccacctcttaaacaaacgttcatcctcgaacgggtttagaattatacctgaagtgctgaataagtgtggatatctgtttcgcatgttttcctcggcctcccaagtcgcttcctcgactggttggcctctccactagacttttactgtagaaatcctcttggaccttaactggcgaacctgtttatcaacaatggaaattggctcctcttcagaacccggtctattatctagctgagctgtgctgaagtctaacacatgtgataggtcgcaatgatactttcggagcatagatacatgaaagaccagatgaactcccgataggctgggaggaaatgcaagctcataagcaacctccccaactcgtttcaacacctcaaatgggcctataaaccttgggctcaacttgcccttcttgtcgaatctcataattcccttcatcggcgaaaccttcaagagaactttttcacctaccataaatgatacatcacgcgctttctggtccacgtaactcttttgtccggactgtgctatgcgaagtcactcctaaatcaactttaccttttccaaggcatcccttaacaaattagtaccatataacttagcctcacctggctcaaaccatccgataggtaaacgacatcgccggccatataaagcctcaaatggagccatttcgatgtgggattggtaactgttattataagcaaactcagccaaaggcaggaaacgatcccactgacctccaaagtcgatcacacatgccctgagcatatcctacaaaatctgaattgtccgctctgattggccgtcggtctgcggatgaaaggctgtgctgagctctacacaggtccccaactcactctgtactgctctccagaaatgtgaagtaaactgagggcctctatctgatatgatggaaattggcacaccgtgcaaccgaactatctcctgaatataaatctgggccaacctctctgaagtatacgtagtcacaacaggaataaaatgtgccgacttggtcaacctgtcaacaatcacccaaactgcatcaaacttcctcaaggtccgcggcaacccaactacaaagtccatagtaattcgttcccatttccactctggtatagtcatctgctgaagtaggccacctggcctctggtgctcatatttaacttgctggcaatttagacacctagctacatactcaactatgtcctttttcattcgtcgccaccaataatgctgcctcaagtcacgatacatcttcgtagcacctagatgaatagaataccgagaactgtatgcctcctccaggatctttttcctcagtccatccacattaagaacacatagacgatcctggagtcacagaacaccatccgctctaatagtaacttccttggcaccacctcatagtaccattttacgaagaaccatcaagtataggtcatcataatggcgagccttgatctgctcaaatagtgaagattgggccaccacacatgcaagaactcggctgggctctgaaatatccagcctcacaagtttgttagccaaggactgaatatctgaggctaatggcctttcttctgctgaaatgaaagccaaactacctatactctccgctttcctgctcaaggaatctgcaaccacatttgctttgcccggatgatacacgatagtaatatcataatcttttagtaactccagctatctgcgctgcctcaaatttagatctctctgcttgaacaaatgctacaaactgcgatgatcactgtaaacttcacaagacaccccataaagataatgcctccaaatctttagagcgtgaacaatcgcagataactccaaatcatgtactggataattcttcttgtggggcttcaactgacgtgaagcatatataataactcacctttcctgcatcaatgcacaacccaagccaacgcgtgacgcgtcgcaatacactgtatatattcccgaaccatatggtaacactaacacgggtgctgtagtcagtgctgtcttgagcttctgaaagcttgactcacattcatcggaccatcggaactgaacacccttctgggttaatttggtcaaaggtgctgcaatagatgaaaaaccttccacgaatcgacgataataacctgctaaacccagaaaactcctgatctcagtcgccgaagtgggacgatgccaattctgaactgcctcaatctttttgggatcaactttaataccttcgcccgatacaatatgtcccaaaaatgctacagactctagccaaaactcacatttagagaacttagcatatagcttttgttcccgcaatgtctgaagcactactctcatatgctgctcatgttcctccttactgcgcgagtagatcaaatgtcatcaatgaagacaatgacaaacgaatcaatatatggcctgaataccctgttcatcagatccataaacgctgttggggcattagataaaccgaaggacatcaccagaaactcataatgaccatatctagtccgaaaagaagtcttcggaacatccgaatcctgaatcttcaactgatggtaccccgaactcaagtcgatcttagagaataccctagcaccctgcaactggtcaaatagatcatcaatacgtggcaacgggtacttgttcttaatagtgactttgttcaattggcgataatcaatacacatctgcattgttccatccttcttcttcacaaataatactggtacaccccaaggcgatacactcggtctgacgaaccctttggctagtaactcttaaagttgttctttcaattccttcggagccatgcgatacggtggaatagatataggctgggtatttgaagccaagtcaatacagaaatcaatatcacgatcaggtagcatacctgaaagatctgacggaaatacatcagagaactcccgaactacaggcattgaatcaatagccagagtctctgcagtagtatccaaaacataggctagataagccaaacaacccttctcaaccatgtgttgagcctttataaaagaattaactcgattaaatgaactaacagacgaacccttccactccagattaggcaatgctggaatagctaaggtaccagtcttggcatgacaatctagaatatcatgatatggagataaccagtcaatgcccagaataatttcaaaattggtcatctcaagcaataggagatctgctctagtttcataatcacagaatgtaataatacaggaccagtagatctgattcacaataacagaatcgcccacaagagtggacacataaataggagtacacaaggactcacaagaaacaccaaggaatggagcaaatagaggtgacacatatgaatacgtagatcatggatcaaataatactgaggcatctttgccacaaacagaaataatacctgtaatcacggaatctgaggcctctacatctggtctagccagaaaagcatcgaaccgagttggagcgctaactggctggcctccgcctgactgacctccacctctaggacgacccctacccacctgtcctccacctctgggtggtcggactactggtggagcaactggtccgataatcataggctgctgaccctgatgtactggtctacccctaagcctggggcaaaacctccgcatataactgggatccccacactcgtaacaactcttcggtgcgatgtgctgctgactaagtgtctggccctagggacgtgaatacccactgggaggaccttgaatagttggtgggcggtaagaactctctaggatagcactgaggtaagggcgcactggagtacctcgaggaggtggtggtgctggatatgggggtctgctggagtgccccctcacgaattgacctctgcccccagacggagcacctctgaactctccagagtacctgaaccgcttatctctcataatctgctctcggctcnnnnnnnnnnnnnnnnnnnnnnnnnnnnnnnnnnnctctggctatctccacaactcgctcataagaagtacccatctcaacctctcgagccatagtggcctgaataccagtatgtaaaccggctacaaacnnnnnnnnnnnnnnnnnnnnnnnnnnnnnnnnnnnnnnnnnnnnnnnnnnnnnnnnnnnnnnnnnnnnnnnnnnnnnnnnnnnnnnnnnnnnnnnnnnnnnnnnnnnnnnnnaagtgcatggcgagataattcagaaaacctcgcctcataattagtcactgacatctgaccttgctatagctgctcaaactgaaatcgcaactcttccctctgggaggttggaatatacctgtccaggaagatacgagtgaacctgtcctaagtcatgggaggagaatctgttggacttccaagaacataagactgccaccatctacgggctctgccctctagctgaaaagtagcaaagtctaccccatgagactccaatatcctcatgtnnnnnnnnnnnnnnnnnnnnnnnnnnnnnnnnnnnnnnnnnnnnnnnnnnnnnnnnnnnnnnnnnnnnnnnnnnnnnnnnnnnnnnnnnnnnnnnnnnnnnnnnnnnnnnnnnnnnnnnnnnnnnnnnnnnnnnnnnnnnnnnnnnnnnnnnnnnnnnnnnnnnntcgctcacccccaaagataggaggatgtagtctagtccatctgtccaatagtttctgaggatcagcggctacagctggcctggtctccacccacgcatagtgcaccatgggtctgatatacaacaactgcctatccatgagcctgcgcagtaggggtctgtgctcccccacccgcctgagatgtggctaggtctgctagaaataaaccggcctgagtcatattgtccatgaatcgcagcatacgacccatgacatcctgaaatcccggtgcagatgtgaagtccaccggagctggctctgccacaggcacctcaccctactccttaataatgggattctctgctggacccactggcggcataaatggaacagtcctggaatgtcctcgccctctaccacgggctggagccctccctcggactcggcctctgcttcggcctctagcaactgggggagtagctcttccctggtctggaacttcattcgagcgcgttctcaccgtctatgagaaaataagagaaggacttttagtgctacatcaattgcacgctggaatatgaagaaaggtaattgcctaataccctatagcctctcaaagataagtacagacgtcaccgtaccgatccgcaagactctattaggtctgctcataacttgtgatacctacgtaaacctagtgctctgataccatgttgtcacgacccaatttcacttgtaggtcgtgatggcgcccaatactacagctaggcaagccaactaataaattaagcatacattaataaaatttaaaaccaagaaatcccaaactctaccaacgtgtgtgccaagacctggtgtcacaagtgcgtgagcatctagtagatgatacaaaactccaaatattgtctgaaatgaaatagacagaatataaatataagaagagacactggtagctgcagaacggctcagaaaggcannnnnnnnnnnnnnnnnnnnnnnnnnnnnnnnnnnnnnnnnnnnngacatggatatgtgatgataggtcctccactagtacctgtctcagatcctgcacaaaaagtgcagcaagtgtagtatgagtacgtaaacaacgtgnnnnnnnnnnnnnnnnnnnnnnnnnnnnnnnnnnnnnnnnnnnnnnnnnnnnnnnnnnnnnnnnnnnnnnnnnnnnnnnnnnnnnnnnnnnnnnnnnnnnnnnnnnnnnnnnnnnnnnnnnnnnnnnnnnnnnnnnnnnnnnnnnnnnnnnnnnnnnnnnnnnnnnnnnnnnnnnnnnnnnnnnnnnnnnnnnnnnnnnnnnnnnnnnnnnnnnnnnnnnnnnnnnnnnnnnnnnnnnnnnnnnnnnnnnnnnnnnnnnnnnnnnnnnnnnnnnnnnnnnnnnnnnnnnnnnnnnnnnnnnnnnnnnnnnnnnnnnnnnnnnnnnnnnnnnnnnnnnnnnnnnnnnnnnnnnnnnnnnnnnnnnnnnnnnnnnnnnnnnnnnnnnnnnnnnnnnntttatttaatcaacggaaataatcaaattccttcaaatgtaacaattctcaatatattaattagattccttcaattcaaataattttgaatttatcaattaaatctcatttacaggagtaacaagtaattccttaacaagcaagaataataattcattaaattccaaggattttctaatttatcaattagcttcacaagctgaaataaattattaaagtatcgtgtaattattattattaagcacgatttctgccaaggacgtacggcccgatccagagtgtcgtgtacactgccgagggacgtgcggcgcgatccatagatgcatctatcctgccgaggcgttcggcccgctccacaagaaaggaggacattttcttatgtgcctccggaaggagagtatatttattataagataaatttgggaggagaacaatttcttttaacaattaattgatttaaacagaaaatcaagcctatgagatttccatcctttaatatctttatctaacaattcacaatatattcatatagatatcaattaatataaataaatcaaagaatacaatttacacaagtaaggcatgctttgagtcctaaactacccggactttagcattaatagtagctacgcacggactctcgtcacctcgtgcgtacgtagtccaaaatcaccatacggagctgttggaatcatcaaaattctattccggggtcgttttcacataattagacatccggtcactattcgaacttaaacattttaatttttcatcaaaattccatatctcgggctagggacctcggaatttgattccgggcatacgcccaagtcccaaatcacgatacggacctaccggaactgtcaaaacactgatccgagtccgtttgctcaaaatgttgaccaaagtcaactcaattgagttttaaagctctaatccacattttaatccatttttcacataaaaactttccaaaaattttacggattgcgcacgcaagtcgaggaatgataaatagtacttttcgaggtcttagaacacataattaattattaaatttaaagatgacattttgggtcatcacattctccacctcttaaacaaacgttcgtcctcgaacgggtttagaattatacctgaagtgctgaataagtgtggatatctgctccgcatgttttcctcggcctcccaagtcgcttcctcgactggttggcccctccactggacttttactgcagaaatcctcttggacctcaactggcgaacctgtttatcaacaatggcaattggctcctcttcataacccaagctattatctagctgaactgtgctgaagtctaacacatgtgataggtcggcatgatacttccggagcatagatacgtgaaaaaccggatgaactcccgataggctgggaggcaatgcaagctcataagcaacctccccaactcgtttcaacacctcaaatgggcctataaaccttgggctcaacttgcccttcttcccgaatctcataattcccttcatcggcgaaaccttcaagagaactttttcacctaccataaatgatatatcacgcgctttctgatccgcgtaactcttttgtctggactgtgctgtacgaagtcgctcctgaatcaactttaccttttccaaggcatcccttaccaaatcagtaccatataacttagcctcacctggctcaaaccatccgataggtgaacgacatcgccgaccatataaagcctcaaatggagccatctcgatgctggattggtaactgttattataagcaaactcggccaaaggcaggaaacgatcccactgacctccaaagtcaatcacacatgccctgagcatatcctccaaaatctgaattgtcctctctgactgccatcggtctgcggatgaaaggctgtgctgagctctacacgggtccccaactcactctgtactgctctccagaaatgtgaagtaaactgagggcctctatctgatatgatggaaattggcacaccgtgcaaccgaactatctcctgaatataaatctgggccaacctctctgaagtatacgtagtcacaacaggaataaaatgtgccgacttggtcaacctgtcaacaatcacccaaactgcatcaaacttcctcaaggtccgcggcaacccaactacaaagtccatagtaattcgttcccatttccactctggtatagtcatctgctgaagtaggccacctggcctctggtgctcatatttaacttgctggcaatttagacacctagctacatactcaactatgtcctttttcattcgtcgccaccaataatgctgcctcaagtcacgatacatcttcgtagcacctggatgaatagaataccgagaactgtgtgcctcctccaggatctttttcctcagttcatccacattaggaacacacagacgatcctggagtcgcagaacaccatccgcaccaatagtaacttccttggcaccacctcgtagtaccgtttcacgaagaaccattaagtgtgggtcatcatactggcgagccttgatctgctcaaatagtgaagactgggccacaacacatgcaagaactcggctgggctctgaaatatccagcctcacaagtctgttagccaaggactgaatatccaaagctaatggcctttcctctgctgaaatgaaagccaaactacccatactctccgcctttctactcaaggcatctgcaaccacatttgctttgcccggatgatacaggatagtaatatcataatcttttagtaactccagccatctgcgctgcctcaaatttaggtccctctgcttgaacaaatgctgcaaactgcgatgatcagtgtaaacttcacaagacaccccataaagataatgcctccaaatcttaagagcgtgaacaatcgcagctaactccaaatcatgtaccggataattctttcgtggggcttcagctgacgtgaagcatatgcaataacttgcccttcctgcatcaatacacaacccaagccaacgcgtgaagcgtcgcaatacactgtatacatccccgaaccggaaggcaacactaacactggtgttgtagtcaatgatgtcttgagcttctgaaagctcacctcacaatcatcggaccatcggaatggagcacccttctgggttaatttggtcaaaggtgctgcaatagatgaaaaaccttccacgaaccgacgataataacctgctaaacccagaaaactcctgatctcagtcgccgaagtgggacgatgccaattctgaactgcctcaatctttttgggatcaactttaataccttcgcccgatacaatatgtcccaaaaatgctacagactctagccaaaactcacatttagagaacttagcatatagcttttgttcccgcaatgtctgaagcactactctcatatgctgctcatgctcctccttactacgtgagtagatcaaaatgtcatcaatgaagacaatgacaaatgaatcaatatatggcctgaataccctgttcatcagatccataaacgctgccggggcattagttaaaccaaaagacattaccagaaactcataatgaccatatctagtacggaaagcagtcttcggaacatccgaatcccgaatcttcaactgatggtaccccgacctcaagtcgatcttagagaacaccctagcaccctgcaactggtcaaatagatcatcaatacgcggcaacgggtacttgttcttaatagtgactttgttcaattggcgataatcaatacacatccgcattgttccatccttcttcttcacaaataataccggtgcaccccaaggcgatacactcggtctgacgaaccctttggctagtaactcttcaagctgttctttcaattctttcaattctttcggagccatgcgatacggtgggatagatataggctgggtatctggagccaagtcaatacagaaatcaatatcacgatcaggtggcatacctggaagatctgaaggaaatacatcggagaactcccgaactacaggcactgaatcaatagccggagtctctgcagtagtatcccgaacataggctagataagccaaacaacccttctcaaccatgtgttgagcctttataaaagaaataactcgattaaatgaactaacagacgaacccttccactccagcttaggcaatgctggaatagccaaggtaacagtcttggcatgacaatctagaatagcatgatatggagataaccagtccatgcccagaataatttcaaaatcggtcatctcaagcaatagagatctgctctagtttcataaccacagaatgtaataatacaggaccggtagatccggttcacaacaacagaatcgcccacaggagtggacacataaacaggagtactcaaggactcacgagaaacacccaggaatggagcaaatagagatgacacatatgaatacgtagatcctggatcaaataatactgaggcatctttgccgcaaacagaaataatacctgtaatcacggcatctgaggcctctgcatctggtctagccggaaaagcatagaaccgagctggagcgccaactggctggcctccgcctggctgacctccacctctaggacggcccctacccacctgtcctccacctcttggtggtcggactactggtggagcaactggtccggtaagcataggctgctgaccctgctgtactggtctaccccgaagcctggggcaaaacctctcgcatgtgactgggatccccgcactcgtaacaactcttcggtgcgatgggctgctgactaagtgtctggccctggggacctgaatacccactgggaggaccctgaatagctggtgggcgataagaactctctggtatagcactgagataaggtcgcactggagcacctcgaggaggtggtggtgctggatatgggggtctgctggactgcccctcacgaactgacctctgcccccagacggagcacctctgaactctccagagtacctgaaccgcttatctctcataatctgctctcggctccgctgacgtacaccctcaatcctccgggctatctccacaactcgctcataagaagtacccatctcaacctctcgagccatagtggcctgaataccagtatgtaaaccggctacaaaccttcgcactctctccgcctcagtagggagtatcataagtgcatggcgagataattcagaaaacctcgcctcataatcagtcactgacatctgaccctgctggagctgctcaaactgaaaccgcaactcttccctctgggagggtggaatatacctgtccaagaagatacgggtgaacctgtcccaagtcatgggaggagaatctgctggtctgccaagagcataagactgccaccatctacgggctctaccctctagctgaaaagtagcgaaatcaaccccatgggattccaatatcctcatgttgtacagtctatccttgcaacgatcaatgaaatcctgtggatcctcatgtcgctcacccccgaagacaggaggatgtagtctagtccatctgtccaatagtttctgaggatcggcggctacagctggcctgggctcaggtgtagctgctgccactggctggactccacccacgggtagtgcaccctgggtctgatatacagcagctgcctgtccatgagcctgcgcggtaggggtctgtgctcccccgcccgcctgagatgtggctgggtctgccggaaataaaccggcctgagtcatattgtccatgaatcgcagcatacgacccatgacatcctgaaatcccggtgcagatgtgaaatccaccggagctggctctgccacaggcacctcaccctgctcctcaataatgggattctctgctggacccactggcggcataactggaatagtcctgggacgtcctcgccctctaccacgggctggagccctccctcggcctctgcctcggcctctagcaactgggggagtagctcttccctggtctggaactcattagagcgtgttctcaccatctgtgagagaataagagaaggatatttagtactacatcaattgcacgatggaatatgaagaaaggtagtttcctaacacccttagcctctcgaagataagtacagacgtctccgtaccgatccgcaaactctattaggtctgctcataacttgtgagacctacgtgaacctagtgctctgataccatgttgtcacgacccaatttcacctataggtcgtgatggcgcccaacactacagctaggcaagccaactaataaattaaacatacattggttaaaattttattccaagaaaataataaaataccaaattctaccaatgtgtgtgccaagacctggtgtcacaagtgcatgagcatctagtagattatacaaaactccaaatactgtctgaaatgaaatagacagaatataaatataagaagagacactggtagctgcagaacggctcagaaaggcagctcaccactatgcctcgggatgacgtgggtatgtgatgataggtcctccactagtacctgtctcagatcctgcacaaaaagtgcagcaagtgtagtatgagtacgtaaacaacgtgtacccagtaagtatcaagcctaatctcgaagtggtagagacgagatggccgactttgacactcactatgggtcaataataataattgaaataaaactaggatatttaaatcagcatgatttacagaatttacaataatttatttaatcagcggaaataatcaaattccttcaaatgtaacaattctcaatatattaattaaattccttcaattcaaataaattccaatttatcaattaaatctcatttacaggagtaacaattaattccttaacaagcaagaataataattcattaaattccaaggattttccaatttattaattagcttcacaagctgaaataaattattaaagtatcgtgtaattattattattaagcacgatttctgccgaggacgtacggcccgatccagagtgtcgtgtacactgccgagggacgtgcggcgcgatccatagatgcatctatcctgccgaggcgttcggcccgctccacaagaaaggaggacattttcttatgtgcctccggaaggagagtatatttattataagataaatttgggaggagaacaatttcttttaacaattaattgatttaaacagaaaatcaagcctatgagatttccatcctttaatatctttatctaacaattcacaatatattcatatagatatcaattaatataaataaatcaaagaatacaatttacacaagtaaggcatgctttgagtcctaaactacccggactttagcattaatagtagctacgcacggactctcgtcacctcgtgcgtacgtagccccccacaattagcaataattatttaattttaatcacctatgaggtagtttccccctcacaagattagacaagagacttacctcgtcttgctctaatttaacccactagaaggccttttccacgattatccaaccctgtccagctcgaatctagccaaaataattcgatataatcactaaaaattataggaatcaattctataagaaaatactacatttttaataaaaattccaaaattatttaaatattcgtctgtggggcccacatctcggaatccggcgaaagttatgaaatctgacaacccattcaattacaagttcaaccataccagtttcactcaaatccgactctgaatcgataccgaaatctcaaaaattcgcttctatgagatttctaaattttttccaaatttcaatctcaaaacactaattaaatggtgaaaacaatgatatatttgtgtatattgaccaaatccgagatgaaatcacttaccccaaatatctttccttgaaaatctgtcaaaatcgcctctgctccagctccaatttgttaaaaaaaagcgaaagagacgaatgccctctttttataaaactgcccaaatagccttcgattgtgaccctcgatcttgggtctcgatcctggccctcgagccttgccctcgatactgtccctcgagccttgccctcgatcctggccctcgagccttgccctcgatcctggccctcgagccttgccttcgatcatggccctcgagctggaccttcgatcatggcttcgatacacaagctcgagcctgagcctcgtcaaacctgggctcgttatctggtctcgatacctgggctcgatatctgggctcgatcacagcccagaatgtccaacagaaaaggaaaaattgcaacagctttttaaatccaatttttgatccgttaaccatccgaaactcacccgaggccctcgggacctcaaccaaatataccaacaaatcctaaaacatcatacgaacttagtcgaacctctaaatcacatcaaacaatgctaaaaccacgaattataccccaattcaagcttaaagaaactaagaatttttcaacttctacattcgatgccggaacctatcaaatcaagtccgattgacctcaaattttgcacacaagtcatacatgacatgacggagctgtgaagattttcagaactggattctgaccccgatctcaaaaagtcaactccctggtcaaacttccaaactttaaattcctatttttgtcatttcaagcctaatttcactagggactaccaaataaaatttcgatcacgcttctaagtccaaaatcaacatacggagctgttagaatcatcaaaattctattttggggtcgtttttacataattagacatccggtcactatttgaacttaaacttttaaattgttcatcaaaattccatatctcgggctagggacctcggaatttgattccgggaatacgcccgagtcccaaatcacgatacggacctaccggaactatcaaaacactgatccgagtctgtttgctccaaatgttgaccaaagtcaactcaattgagttttaaagctctaattcacattttaatcgattttttgaggtcttagaacacataattaattattaaatttaaagatgacattttggcctctccactggacttttactgcagaaatcctcttggaccttaactggcgaacctgtttatcaacaatggcaattgtctcctcttcataacccaagctattatctagctgaactgtgctgaattctaacacatgtgatccagtcgaggaagcgacttgggaggccgaggaaacatgcggagcagatatccacacttattcagcactccaggtataattctaaacccgttcgaggacgaacgtttgtttaagaggtggagaatgtatgacccaaaatgtcattttaaatttaataattaattatgtgttctaagacctcgaaaagtactatttatcattcctcgacttgcgtgcgcaatccgtaaaaattttggaaagtttttatgtgaaaaatggattaaaatgtgaattagagctttaaaactcaattgagttgactttggtcaacattttgagcaaacggactcggatcagtgttttgacagttcggtaggtccgtatcgtgatttgggacttgggcgtatggaatcaaattccgaggtccctagcccgagatatggaattttgatgaaaaattaaaagtttaagttcaaatagtgaccggatgtcaattatgtgcaaacgaccccggaatagaattttgatgattccaacagctccgtatggtgattttggacttaggagcgtgatcggaaattttatttggaagtccgtagtgaaattaggcttgaaatggctaaaataggaatttaagtttggaagtttgaccggggagttgactttttgatatcggagtcggaatccagttccaaaattttcatagctccgttatgtcatttatgacttgtgtgtaaaatttgaggtcaatcggagttgatttgataggttccgacatcgaatgtagaagttgaaaactcttagtttcattaagcttgaattggggtatgattcatggttttagcgttgtttgatgtgatttagaggttcgactaagttcgtatgatgttttaggacttgttggtatatttggttgaggtcccgagggcctcgggtgagtttcgattgtcacgacccaatttcacctataggtcgtgatggcgcccaacactacagctaggcaagccaactaataaattaagcatacattgattaaacttttattccaagaaaaataataataccaacttctaccaatgtgtgtgccaagacccggtgtcacaagtgcatgagcatctagtagattatacaaaactccaaatactgtctgaaatgaaatagacagaatataaatataagaagagacactggtagctgcagaacggctcagaaaggcagctcaccactatgcctcgggatgacgtgggtatgtgatgataggtcctccactagtacctgtctcagatcctgcacaaaaagtgcagcaagtgtagtatgagtacgtaaacaacgtgtacccagtaagtatcaagcctaatctcgaagtggtagagacgagatggccgactttgacactcactataggtcaataataattgaaataaaactaggatatttaaatcaatgtgatttacagaatttatttaatcagcgaaataatcaaattccttcaaatgtatcaattttcaatatattaattaaattccttcaattcaaataaattccaatttatcaattaaatctcatttacaggagtaacaattaattccttaacaagcaagaataataattcattaaattccaagattttccaatttataattagcttcacaagctgaaataaattattaaagtatcgtgtaattattattattattagcacgatttctgccgaggacgtacggcccgatccagagtgtcgtgtacactgccgagggacgtgcggcgcgatccatagatgcatctatcctgccgaggcgttcggcccgctccacaagaaaggaggacattttcttatgtgcctccggaaggagagtatatttattataagataaatttgggaggagaacaatttcttttaacaattaattatttaaacagaaatcaagcctatgagattttcatcctttaatatctttatctaaacaattcacaatatatatcatatatatcaattaatattaaaaaaatacaatttacacaagtaattcatgctttgagtcctaaactacccggactttagcattaatagtagctacgcacggactctcgtcacctcgtgcgtacgtagcccccacaattagcaacaattatttaattttaatcacctatgaggtaatttccccctcacaagattagacaagagacttacctcgtcttgctccaatttaatccactataaggccttttccacgattattctaagcatacattgattaaacttttattccaagaaaataataaaataccaacttctaccaatgtgtgtgccaagacccggtgtcacaagtgcatgagcatctagtagattatacaaaactccaaatactgtctgaaatgaaatagacagaatataaatataagaagagacactggtagctgcagaacggctcagaaaggcagctcaccactatgcctcgggatgacgtgggtatgtgatgataggtcctccactagtacctgtctcagatcctgcacaaaaagtgcagcaagtgtagtatgagtacgtaaacaacgtgtacccagtaagtatcaagcctaatctcgaagtggtagagacgagatggccgactttgacactcactataggtcaataacaattgaaataaaactaggatatttaaatcaatgtgatttacagaatttatttaatcagcgaaaataatcaaattccttcaaatgtatcaattttcaatatattaattaaattccttcaattcaaataaattccaatttatcaattaaatctcatttacaggagtaacaattaattccttaacaagcaagaataataattcattaaattccaagattttccaatttataattagcttcacaagctgaaataaattattaaagtatcgtgtaattattattattaagcacgatttctgccgaggacgtacggcccgatccagagtgtcgtgtacactgccgagggacgtgcggcgcgatccatagatgcatctatcctgccgaggcgttcggcccgctccacaagaaaggaggacattttcttatgtgcctccggaaggagagtatatttattataagataaattgggaggagaacaatttcttttaacaattaattaatttaaacagaaaatcaagcctatgagatttccatcctttaatatctttatctaacaattcacaatatatatatatatatatcatatatataattaatataaatcaaagaatacaatttacacaagtaattcatgctttgagtcctaaactacccggactttagcattaatagtagctacgcacggactctcgtcacctcgtgcgtacgtagcccccacaattagcaataattatttaatttaatcacctatgaggtaatttcccctcacaagattagacaagagacttacctcgtcttgctccaatttaatccactataaggccttttccacgattatccaactctgtctggctcgaatctagccaaaataattcgatacaatcactaaatattataggaatcaattctataagaaaatactacattttaaaaaatcccgaaattaattaaaaattcgcccgcggggcccacatctcggaatccggcgaaagttatgaaatccgacaacccattcaattacgagtccaaccataccagtttcactcaaatccgactccgaatcgataccgaaatctcaaaatttcgtttctatgagatttctaaacttttccaaatttcaatctcaaaacactaattaaatgtgaaaacaatgatatattcttgtatattgaccaaatccgagttagaatcacttaccccaatgtttttcccttgaaaatctgccaaaagtcgcctctgctcaagctcaagttcgcaaaaatggcaaatgggacgaatgtcctctgtttttataactgcccagcagttcggaactgggcctcgaacagggcctcgatcgcggcatcgaacatgtgccttcgatcagggcatcgagggttgggcctcgatcctagccctcgagccataccttcgatcatgccatcgagccttaccttcgatcgtgacttcgatcacaggctcgagcctggacctcggtcatggcctcgatcagggtatcgaggttgggccttcgatcatagcctcaatcatgcatcgagcttgagccttcgatcagggcatcgagcatgggtctcgatcctagccctcgagccttacttcgatcatgccctcgagccttgccttcgatcgaggcttcgatactgagcctcgtccctggcttcgactcaggcctcgatcgtgggctcgatatctggggctcgatctgatctcgatccagatcctcgagcccagaatcagcagaagagaaaattgcagcagctttttaagtccaacttttgatccgttaaccatccgaaactcacccgaggccctcgggacctcaaccaaatataccaacaagtcctaaaacatcatacgaacttagtcgaacctctaaatcacatcaaacaacgctaaaaccatgaatcataccccaattcaagcttaatgaaactaagagttttcaacttctacattcgatgtcggaacctatcaaatcaactccgattgacctcaaattttacacacaagtcataaattacataacggagctatgaaaattttcggaactggattccgactccggtatcaaaaagtcaactccccggtcaaacttccaaacttaaattcctattttagccatttcaagcctaatttactacggacttccaaataaaattccgaacacgctcctaagtccaaaatcaccatacggagctgttggaatcatcaaaattctattccggggtcgttttctcaaaatgttgaccgaagtcaaacttagcactttaaggccaacttaaggaaccaagtgttccggtttcacccaaacacttccaaatcccgaaccaaccatccccgcaagtcataaatcattacaagcacctacggaagttttattttagggaacggggttctaaaagttaaaatgaccggttgggtcattacattctccacctcttaaacaaacgttcgtcctcgaacgggtttagaattgtacctggagtgctgaataagtgtggatatctgctccgcatgtctttcctcggcctcccaagtcgcttcctcgactggttggcccctccactggacttttactgcagaaatcctcttggacctcaactggcgaacctgtttatcaacaatggcaattggctcctcttcataacccaagctattatctagctgaactgtgctgaagtctaacacatgtgataggtcggaatgatacttccagagcatagatacatgaaagaccggatgaactcccgataggctgggaggcaatgcaagctcataagcaacctccccaactcgttttaacacctcaaatgggcctataaaccgccgacctatcacatgtgttagacttcagcacagttcagctagataatagcttgggttatgaagaggagccaattgccattgttgataaacaggttcgccagttgaggtccaagaggatttctgcagtaaaagtccagtggaggggccaaccagtcgaggaagcgacttgggaggccgaggaaacatgcggagcagatatccacacttattcagcactccaggtataattctaaacccgttcgaggacgaacgtttgtttaagaggtggagaatgtatgacccaaaatgtcattttaaatttaataattaattatgtgttctaagacctcgaaaagtactatttatcattcctcgacttgcgtgcgcaatccgtaaaaattttggaaagtttttatgtgaaaaatggattaaaatgtgaattagagctttaaaactcaattgagttgactttggtcaacattttgagcaaacggactcggatcagtgttttgacagttcggtaggtccgtatcgtgatttgggacttgggcgtatggaatcaaattccgaggtccctagcccgagatatggaattttgatgaaaaattaaaagtttaagttcaaatagtgaccggatgtcaattatgtgcaaacgaccccggaatagaattttgatgattccaacagctccgtatggtgattttggacttaggagcgtgatcggaaattttatttggaagtccgtagtgaaattaggcttgaaatggctaaaataggaatttaagtttggaagtttgaccggggagttgactttttgatatcggagtcggaatccagttccaaaattttcatagctccgttatgtcatttatgacttgtgtgtaaaatttgaggtcaatcggagttgatttgataggttccgacatcgaatgtagaagttgaaaactcttagtttcattaagcttgaattggggtatgattcatggttttagcgttgtttgatgtgatttagaggttcgactaagttcgtatgatgttttaggacttgttggtatatttggttgaggtcccgagggcctcgggtgagtttcgattgtcacgacccaatttcacctataggtcgtgatggcgcccaacactacagctaggcaagccaactaataaattaagcatacattgattaaacttttattccaagaaaaataataataccaacttctaccaatgtgtgtgccaagacccggtgtcacaagtgcatgagcatctagtagattatacaaaactccaaatactgtctgaaatgaaatagacagaatataaatataagaagagacactggtagctgcagaacggctcagaaaggcagctcaccactatgcctcgggatgacgtgggtatgtgatgataggtcctccactagtacctgtctcagatcctgcacaaaaagtgcagcaagtgtagtatgagtacgtaaacaacgtgtacccagtaagtatcaagcctaatctcgaagtggtagagacgagatggccgactttgacactcactataggtcaataataattgaaataaaactaggatatttaaatcaatgtgatttacagaatttatttaatcagcgaaataatcaaattccttcaaatgtatcaattttcaatatattaattaaattccttcaattcaaataaattccaatttatcaattaaatctcatttacaggagtaacaattaattccttaacaagcaagaataataattcattaaattccaagattttccaatttataattagcttcacaagctgaaataaattattaaagtatcgtgtaattattattattattagcacgatttctgccgaggacgtacggcccgatccagagtgtcgtgtacactgccgagggacgtgcggcgcgatccatagatgcatctatcctgccgaggcgttcggcccgctccacaagaaaggaggacattttcttatgtgcctccggaaggagagtatatttattataagataaatttgggaggagaacaatttcttttaacaattaattatttaaacagaaatcaagcctatgagattttcatcctttaatatctttatctaaacaattcacaatatatatcatatatatcaattaatattaaaaaaatacaatttacacaagtaattcatgctttgagtcctaaactacccggactttagcattaatagtagctacgcacggactctcgtcacctcgtgcgtacgtagcccccacaattagcaacaattatttaattttaatcacctatgaggtaatttccccctcacaagattagacaagagacttacctcgtcttgctccaatttaatccactataaggccttttccacgattattctaagcatacattgattaaacttttattccaagaaaataataaaataccaacttctaccaatgtgtgtgccaagacccggtgtcacaagtgcatgagcatctagtagattatacaaaactccaaatactgtctgaaatgaaatagacagaatataaatataagaagagacactggtagctgcagaacggctcagaaaggcagctcaccactatgcctcgggatgacgtgggtatgtgatgataggtcctccactagtacctgtctcagatcctgcacaaaaagtgcagcaagtgtagtatgagtacgtaaacaacgtgtacccagtaagtatcaagcctaatctcgaagtggtagagacgagatggccgactttgacactcactataggtcaataacaattgaaataaaactaggatatttaaatcaatgtgatttacagaatttatttaatcagcgaaaataatcaaattccttcaaatgtatcaattttcaatatattaattaaattccttcaattcaaataaattccaatttatcaattaaatctcatttacaggagtaacaattaattccttaacaagcaagaataataattcattaaattccaagattttccaatttataattagcttcacaagctgaaataaattattaaagtatcgtgtaattattattattaagcacgatttctgccgaggacgtacggcccgatccagagtgtcgtgtacactgccgagggacgtgcggcgcgatccatagatgcatctatcctgccgaggcgttcggcccgctccacaagaaaggaggacattttcttatgtgcctccggaaggagagtatatttattataagataaattgggaggagaacaatttcttttaacaattaattaatttaaacagaaaatcaagcctatgagatttccatcctttaatatctttatctaacaattcacaatatatatatatatatatcatatatataattaatataaatcaaagaatacaatttacacaagtaattcatgctttgagtcctaaactacccggactttagcattaatagtagctacgcacggactctcgtcacctcgtgcgtacgtagcccccacaattagcaataattatttaatttaatcacctatgaggtaatttcccctcacaagattagacaagagacttacctcgtcttgctccaatttaatccactataaggccttttccacgattatccaactctgtctggctcgaatctagccaaaataattcgatacaatcactaaatattataggaatcaattctataagaaaatactacattttaaaaaatcccgaaattaattaaaaattcgcccgcggggcccacatctcggaatccggcgaaagttatgaaatccgacaacccattcaattacgagtccaaccataccagtttcactcaaatccgactccgaatcgataccgaaatctcaaaatttcgtttctatgagatttctaaacttttccaaatttcaatctcaaaacactaattaaatgtgaaaacaatgatatattcttgtatattgaccaaatccgagttagaatcacttaccccaatgtttttcccttgaaaatctgccaaaagtcgcctctgctcaagctcaagttcgcaaaaatggcaaatgggacgaatgtcctctgtttttataactgcccagcagttcggaactgggcctcgaacagggcctcgatcgcggcatcgaacatgtgccttcgatcagggcatcgagggttgggcctcgatcctagccctcgagccataccttcgatcatgccatcgagccttaccttcgatcgtgacttcgatcacaggctcgagcctggacctcggtcatggcctcgatcagggtatcgaggttgggccttcgatcatagcctcaatcatgcatcgagcttgagccttcgatcagggcatcgagcatgggtctcgatcctagccctcgagccttacttcgatcatgccctcgagccttgccttcgatcgaggcttcgatactgagcctcgtccctggcttcgactcaggcctcgatcgtgggctcgatatctggggctcgatctgatctcgatccagatcctcgagcccagaatcagcagaagagaaaattgcagcagctttttaagtccaacttttgatccgttaaccatccgaaactcacccgaggccctcgggacctcaaccaaatataccaacaagtcctaaaacatcatacgaacttagtcgaacctctaaatcacatcaaacaacgctaaaaccatgaatcataccccaattcaagcttaatgaaactaagagttttcaacttctacattcgatgtcggaacctatcaaatcaactccgattgacctcaaattttacacacaagtcataaattacataacggagctatgaaaattttcggaactggattccgactccggtatcaaaaagtcaactccccggtcaaacttccaaacttaaattcctattttagccatttcaagcctaatttactacggacttccaaataaaattccgaacacgctcctaagtccaaaatcaccatacggagctgttggaatcatcaaaattctattccggggtcgttttctcaaaatgttgaccgaagtcaaacttagcactttaaggccaacttaaggaaccaagtgttccggtttcacccaaacacttccaaatcccgaaccaaccatccccgcaagtcataaatcattacaagcacctacggaagttttattttagggaacggggttctaaaagttaaaatgaccggttgggtcattacattctccacctcttaaacaaacgttcgtcctcgaacgggtttagaattgtacctggagtgctgaataagtgtggatatctgctccgcatgtctttcctcggcctcccaagtcgcttcctcgactggttggcccctccactggacttttactgcagaaatcctcttggacctcaactggcgaacctgtttatcaacaatggcaattggctcctcttcataacccaagctattatctagctgaactgtgctgaagtctaacacatgtgataggtcggcatgatacttccggagcatagatacgtgaaaaacggatgaactcccgataggctgggaggcaatgcaagctcataagcaacctccccaactcgtttcaacacctcaaatgggcctataaaccttgggctcaacttgcccttcttcccgaatatcataattcccttcatcggcgaaacttcaagagaacgttttcacctaccataaatgatacatcacgcgctttctgatccacgtaactcttttgtctggactgtgctgtacgaagtcgctcctgaatcaactttaccttttctaaggcatcccttaccaaatcagtgattcgggaagaagggcaagttgagcccaaggtttataggcccatttgaggtgttgaaacgagttggggaggttgcttatgagcttgcattgcctcccagcctatcgggagttcatccggtttttcacgtatctatgctccggaagtatcatgccgacctatcacatgtgttagacttcagcacagttcagctagataatagcttgggttatgaagaggagccaattgccattgttgataaacaggttcgccagttgaggtccaagaggatttctgcagtaaaagtccagtggaggggccaaccagtcgaggaagcgacttgggaggccgaggaaacatgcggagcagatatccacacttattcagcactccaggtataattctaaacccgttcgaggacgaacgtttgtttaagaggtggagaatgtatgacccaaaatgtcattttaaatttaataattaattatgtgttctaagacctcgaaaagtactatttatcattcctcgacttgcgtgcgcaatccgtaaaaattttggaaagtttttatgtgaaaaatggattaaaatgtgaattagagctttaaaactcaattgagttgactttggtcaacattttgagcaaacggactcggatcagtgttttgacagttcggtaggtccgtatcgtgatttgggacttgggcgtatggaatcaaattccgaggtccctagcccgagatatggaattttgatgaaaaattaaaagtttaagttcaaatagtgaccggatgtcaattatgtgcaaacgaccccggaatagaattttgatgattccaacagctccgtatggtgattttggacttaggagcgtgatcggaaattttatttggaagtccgtagtgaaattaggcttgaaatggctaaaataggaatttaagtttggaagtttgaccggggagttgactttttgatatcggagtcggaatccagttccaaaattttcatagctccgttatgtcatttatgacttgtgtgtaaaatttgaggtcaatcggagttgatttgataggttccgacatcgaatgtagaagttgaaaactcttagtttcattaagcttgaattggggtatgattcatggttttagcgttgtttgatgtgatttagaggttcgactaagttcgtatgatgttttaggacttgttggtatatttggttgaggtcccgagggcctcgggtgagtttcgattgtcacgacccaatttcacctataggtcgtgatggcgcccaacactacagctaggcaagccaactaataaattaagcatacattgattaaacttttattccaagaaaaataataataccaacttctaccaatgtgtgtgccaagacccggtgtcacaagtgcatgagcatctagtagattatacaaaactccaaatactgtctgaaatgaaatagacagaatataaatataagaagagacactggtagctgcagaacggctcagaaaggcagctcaccactatgcctcgggatgacgtgggtatgtgatgataggtcctccactagtacctgtctcagatcctgcacaaaaagtgcagcaagtgtagtatgagtacgtaaacaacgtgtacccagtaagtatcaagcctaatctcgaagtggtagagacgagatggccgactttgacactcactataggtcaataataattgaaataaaactaggatatttaaatcaatgtgatttacagaatttatttaatcagcgaaataatcaaattccttcaaatgtatcaattttcaatatattaattaaattccttcaattcaaataaattccaatttatcaattaaatctcatttacaggagtaacaattaattccttaacaagcaagaataataattcattaaattccaagattttccaatttataattagcttcacaagctgaaataaattattaaagtatcgtgtaattattattattattagcacgatttctgccgaggacgtacggcccgatccagagtgtcgtgtacactgccgagggacgtgcggcgcgatccatagatgcatctatcctgccgaggcgttcggcccgctccacaagaaaggaggacattttcttatgtgcctccggaaggagagtatatttattataagataaatttgggaggagaacaatttcttttaacaattaattatttaaacagaaatcaagcctatgagattttcatcctttaatatctttatctaaacaattcacaatatatatcatatatatcaattaatattaaaaaaatacaatttacacaagtaattcatgctttgagtcctaaactacccggactttagcattaatagtagctacgcacggactctcgtcacctcgtgcgtacgtagcccccacaattagcaacaattatttaattttaatcacctatgaggtaatttccccctcacaagattagacaagagacttacctcgtcttgctccaatttaatccactataaggccttttccacgattattctaagcatacattgattaaacttttattccaagaaaataataaaataccaacttctaccaatgtgtgtgccaagacccggtgtcacaagtgcatgagcatctagtagattatacaaaactccaaatactgtctgaaatgaaatagacagaatataaatataagaagagacactggtagctgcagaacggctcagaaaggcagctcaccactatgcctcgggatgacgtgggtatgtgatgataggtcctccactagtacctgtctcagatcctgcacaaaaagtgcagcaagtgtagtatgagtacgtaaacaacgtgtacccagtaagtatcaagcctaatctcgaagtggtagagacgagatggccgactttgacactcactataggtcaataacaattgaaataaaactaggatatttaaatcaatgtgatttacagaatttatttaatcagcgaaaataatcaaattccttcaaatgtatcaattttcaatatattaattaaattccttcaattcaaataaattccaatttatcaattaaatctcatttacaggagtaacaattaattccttaacaagcaagaataataattcattaaattccaagattttccaatttataattagcttcacaagctgaaataaattattaaagtatcgtgtaattattattattaagcacgatttctgccgaggacgtacggcccgatccagagtgtcgtgtacactgccgagggacgtgcggcgcgatccatagatgcatctatcctgccgaggcgttcggcccgctccacaagaaaggaggacattttcttatgtgcctccggaaggagagtatatttattataagataaattgggaggagaacaatttcttttaacaattaattaatttaaacagaaaatcaagcctatgagatttccatcctttaatatctttatctaacaattcacaatatatatatatatatatcatatatataattaatataaatcaaagaatacaatttacacaagtaattcatgctttgagtcctaaactacccggactttagcattaatagtagctacgcacggactctcgtcacctcgtgcgtacgtagcccccacaattagcaataattatttaatttaatcacctatgaggtaatttcccctcacaagattagacaagagacttacctcgtcttgctccaatttaatccactataaggccttttccacgattatccaactctgtctggctcgaatctagccaaaataattcgatacaatcactaaatattataggaatcaattctataagaaaatactacattttaaaaaatcccgaaattaattaaaaattcgcccgcggggcccacatctcggaatccggcgaaagttatgaaatccgacaacccattcaattacgagtccaaccataccagtttcactcaaatccgactccgaatcgataccgaaatctcaaaatttcgtttctatgagatttctaaacttttccaaatttcaatctcaaaacactaattaaatgtgaaaacaatgatatattcttgtatattgaccaaatccgagttagaatcacttaccccaatgtttttcccttgaaaatctgccaaaagtcgcctctgctcaagctcaagttcgcaaaaatggcaaatgggacgaatgtcctctgtttttataactgcccagcagttcggaactgggcctcgaacagggcctcgatcgcggcatcgaacatgtgccttcgatcagggcatcgagggttgggcctcgatcctagccctcgagccataccttcgatcatgccatcgagccttaccttcgatcgtgacttcgatcacaggctcgagcctggacctcggtcatggcctcgatcagggtatcgaggttgggccttcgatcatagcctcaatcatgcatcgagcttgagccttcgatcagggcatcgagcatgggtctcgatcctagccctcgagccttacttcgatcatgccctcgagccttgccttcgatcgaggcttcgatactgagcctcgtccctggcttcgactcaggcctcgatcgtgggctcgatatctggggctcgatctgatctcgatccagatcctcgagcccagaatcagcagaagagaaaattgcagcagctttttaagtccaacttttgatccgttaaccatccgaaactcacccgaggccctcgggacctcaaccaaatataccaacaagtcctaaaacatcatacgaacttagtcgaacctctaaatcacatcaaacaacgctaaaaccatgaatcataccccaattcaagcttaatgaaactaagagttttcaacttctacattcgatgtcggaacctatcaaatcaactccgattgacctcaaattttacacacaagtcataaattacataacggagctatgaaaattttcggaactggattccgactccggtatcaaaaagtcaactccccggtcaaacttccaaacttaaattcctattttagccatttcaagcctaatttactacggacttccaaataaaattccgaacacgctcctaagtccaaaatcaccatacggagctgttggaatcatcaaaattctattccggggtcgttttctcaaaatgttgaccgaagtcaaacttagcactttaaggccaacttaaggaaccaagtgttccggtttcacccaaacacttccaaatcccgaaccaaccatccccgcaagtcataaatcattacaagcacctacggaagttttattttagggaacggggttctaaaagttaaaatgaccggttgggtcattacattctccacctcttaaacaaacgttcgtcctcgaacgggtttagaattgtacctggagtgctgaataagtgtggatatctgctccgcatgtctttcctcggcctcccaagtcgcttcctcgactggttggcccctccactggacttttactgcagaaatcctcttggacctcaactggcgaacctgtttatcaacaatggcaattggctcctcttcataacccaagctattatctagctgaactgtgctgaagtctaacacatgtgataggtcggcatgatacttccggagcatagatacgtgaaaaacggatgaactcccgataggctgggaggcaatgcaagctcataagcaacctccccaactcgtttcaacacctcaaatgggcctataaaccttgggctcaacttgcccttcttcccgaatctcataattcccttcatcggcgaaaccttcaagagaactttttcacctaccataaatgataatcacgcgctttctgatccgcgtaactcttttgtctggactgtgctgtacgaagtcgctcctgaatcaactttaccttttccaaggcatcccttaccaaatcagtaccatataacttagcctcacttggctcaaaccatccaataggtgaacgacaatgccgaccatataaagcctcaaatggagccatttcgatgctggattggtaactgttattataagcaaactcggccaaaggcaggaaacgatcccactgacctccaaagtcgatcacacatgacctaagcatatcctccaaaatctgaattgtccgctctgactgcccgtcggtcgcggatgaaatgttatgctgaactctacacgggtccccaactcactctgtactgctctccagaaatgtgaagaaaattgggggcctctatctcatatgatagaaattggcacaccgtgcaaccgaactatatccgaaatataaatctgggcccaacctttctgaagtatacgtagtcacaacaggaataaaatgtgccgacttggtcaacctgtcaacaatcaccaaaactgcatcaaatttcctcaaggtccgcgacaacccaactacaaagtccatagtaattcgttcccatttccactctggtatagtcatctgttgaagtaggccacctggcctctggtgctcataattaacttactggcaatttagacacctagatacatactcaactatgtcctttttcattcgtcgccaccaataatgttgcctcaagtcacgatacatcttagtagcacctggatgaatagaataccgagaactgtgtgcctcatccaggatctttttcctcggtccatccacattaggaacacatagacgatcctggagtcacagaacaccatccgctctaatagtaacttccttggcaccacctcgtagtaccatttcacgaagaaccatcaagtatgggtcatcataatagcgagccttgatctgctcaaatagtgaagattgggccaccacacatgcaagaactcggttgggctatgaaatatccagcctcacaagtttgttagccaaggactgaatatctgaggctaatggcctttcctctcctgaaatgaaaaccaaactacccatactctctgctttcctgctaaaggaatttgcaaccacatttgctttgcccggatgatacaagatagtaatatcataatcttttagtaactccagccatctgcgctgcctcaaatttagatccctctgcttgaacaaatgctacaaactgcgatgatcagtgtaaacttcacaagacaccccataaagataatgcctccaaatctttagagcgtgaacaatcgcagctaactccaaatcatgtactggataattcttctcgtggggcttcagctgacgtgaagcatatgcaataacttgcctttcctacatcaatacacaacccaagccaatgcgtgacgcgtcacaatacactgtatatattccgaaccatatggtaacactaacacgggtgctgtagtcagtgctatcttgagcttctgaaagcttgactcgcaatcatcggaccatcagaactgaatacccttctgggttaatttggtcaaaggtgctacaatagatgaaacaccttccacgaatcgacgataataacctgctaaacctagaaaactcctgatctcagtcgccgaagtgggacgatgctaattctgaattgcctcaatctttttgggatcaactttaataccttcgcccgatacaatatgtcccaaaaatgctacagactctagccaaaactcacatttagagaacttagcatatagcttttgttcccgcaatgtctgaagcactactctcatatgctgctcatgttcctccttactgcgcgagtagatcaaatgtcatcaatgaagacaatgacaaacgaatcaatatatggcctgaataccatgttcatcagatccataaatgatgctggggcattagataaaccgaaggacatcaccagaaactcataatgaccatatctagtccgaaaagcagtcttcggaacatccgaatcctgaatcttcaactgatggtaccccgacctcaagtcgatcttagagaataccctagcaccctgcaactggtcaaatagatcatcaatacgcggcaacgggtacttgttcttaatagtgactttgttcaattggcgataatcaatacacatccgcattgttccatccttctttttcacaaataatactggtgcaccccaaggcgatacactcggtctgacgaaccctttggctagtaactcttcaagctgttctttcaattctttcggagccatgcgatacggtgggatagatataggctgggtatctgaagccaagtcaatacagaaatcaatatcacgatcaggtggcatacctggaagatctgaaggaaatacatcggggaactcccgaactacaggcactgaatcaatagccggagtctctgcagtagtatcccgaacataggctagataagccaaacaacccttctcaaccatgtgttgagcctttataaaagaaataactcgattaaatgaactaacagacgaacccttccactccagcttaggcaatgctggaatagccaaggtaacagtcttggcatgacaatctagaatagcatgatatggagataaccagtccatgcccagaataatttcaaaatcggtcatctcaagcaataggagatctgctctagtttcataaccacagaatgtaataatacaggaccggtagatccggttcacaacaacagaatcgcccacaggagtggacacataaacaggagtactcaaggactcacgagaaacacccaggaatggagcaaatagagatgacacatatgaatacgtagatcctggatcaaataatactgaggcatctttgccacaaacagaaataatacctgtaatcacggcatctgaggcctctgcatctggtctagccggaaaagcatagaaccgagctggagcgccaactggctggcctccgcctggctgacctccacctctaggacggcccctacccacctgtcctccacctctggtggtcggactactggtggagcaactggtccggtaagcataggctgctgaccctgctgtactggtctacccaagcctggggcaaaacctccgcatgtgactgggatccccgcactcgtaacaactcttcggtgcgatgggctgctgactaagtgtctggccctggggacctgaatacccactgggaggaccctgaatagctggtgggcggtaagaactctctgggatagcactgagataaggtcgcactggagcacctcgaggaggtggtggtgctggatatgggggtctgctggactgcccctcacgaactgacctctgcccccggacggagcacctctgaactctccagagtacctgaaccgcttatctctcataatctgctctcggctccgctgacgtacaccctcaatcctccgggctatctccacaactcgctcataagaagtacccatctcaacctctcgagccatagtggctgaataccagtatgtaaatgtaatgacccaaccggtcattttaacttttagaaccccgttccctaaaataaaacttccgtaggtgcttgtaatgatttatgacttgcggggatggttggttcgggatttggaagtgtttgggttgaaaccggaacacttggttccttaagttggccttaaagtgctaagtttgacttcggtcaacattttgagaaaacgaccccggaatagaattttgatgattccaacagctccgtatggtgattttggacttaggagcgtgttcggaattttatttggaagtccgtagttaaattaggcttgaaatggctaaaaacaagaatttaagtttggaagtttgaccgatgagttgactttttgataccggagtcggaatccagttccgaaaattttcatagctccgttatgtaatttatgacttgtgtgtaaaatttgaggtcaatcggagttgatttgataggttccgacattgaatgtagaagttgaaaactcttagtttcattaagcttgaattggggtatgattcatggttttagcgttgtttgatgtgatttagaggttcgactaagttcgtatgatgttttaggacttgttggtatatttggttgaggtcccgagggcctcgggtgagtttcggatggttaacggatcaaaaatttgagttaaaaagctgctgcaatttttcctcttctgttggacattctgggctgtgatcgagcccagatatcgagcccagatatcgagcccgaagggttgacgaggtacaggctcgagctagtgtatcgaagccatgatcgaaggtccagctcgagggccatgatcgaaggcaaggctcgagggccaggatcgagacccaagatcgagggtcacaatcgaaggctcaagctcgatgccatgattgaggctatgatcgaaggcccaacctcgatgccctgatcgaggccatgaccgaggtccaggctcgagcctgtgatcgaagcccgatcgaggcccagttcgaggaccagttccgaaggctgctgggcagttttataaaaagagggcattcgtcccatttgccatttttgacgaacttgagcttgagcagagacgacttttggcagattttcaagggaaaaacattggggtaagtgattctaactcggatttggtctacatatacaagtatatcattgttttcacaatttaattagtgttttgagattgaaatttggaaaagtttagaaatctcatagaaacgaaattttgagatttcggtatcgattcggagtcggatttgagtgaaactggtatggttggactcgtaattgaatgggttgtcggatttcataacttttgccggattccgagatgtgggccccgcgggcgaatttttaattaatttcgggatttttcttaaaatgtagtattttcttatagaattgattcctataatatttagtgattgtatcgaattattttggctagattcgagccagacggagttggataatcgtggaaaaggccttatagtggattaaattggagcaagacgaggtaagtctcttgtctaatcttgtgagggggaaattacctcataggtgattaaaattaaataattgttgctaattgtggggggctacgtacgcacgaggtgacgagagtccgtgcgtagctactattaatgctaaagtccgggtagtttaggactcaaagcatgcctttacttgtgtaaattgtattctttgattatttatattaattgatatctatatgaatatattgtgaattgttagataaagatattaaaggatgaaatctcataggcttgatttctgtttaaatcaattaattgttaaaagaaattgttctcctcccaaatttatcttataataaatatactctccttccggaggcacataagaaaatgtcctcctttcttgtggagcgggccgaacgcctcggcaggatagatgcatctatggatcgcgccgcacgtccctcggcagtgtacacgacactctggatcgggccgtacgtcctcggcagaaatcgtgcttaataataataataattacacgatgctttaataatttatttcagcttgtgaagctaattagtaaattgaaaaatctttggaatttaatgaattattattcttgcttgttaaggaattaattgttactcctgtaaatgagatttaattgataaattggaatttatttgaattgaaggaatttaattaatatattgagaattgtacatttgaaggaatttgattatttccgctgattaaataaattattgtaaattctgtaaatcatgctgatttaaatatcctagttttatttcaattattattgacccatagtgagtgtcaaagtcggccatctcgtctctaccacttcgagattaggcttgatacttactgggtacacgttgtttacgtactcatactacacttgctgcactttttgtgcaggatctgagacaggtactagtggaggacctatcatcacatacccacgtcatcccgaggcatagtggtgagctgcctttctgagccgttctgcagctaccagtgtctcttcttatatttatattctgtctatttcatttcagacagtatttggagttttgtataatctactagatgctcatgcacttgtgacaccgggtcttggcacacacattggtagaattggtattttattattttcttggaataaaagtttaaccaatgtatgtttgacttattagttggcttgcctagctgtagtgttgggcgccatcacgacctataggtgaaattgggtcgtgacaacatggtatcagagcactaggttcacgtaggtctcacaagttatgagcagacctaatagagtcttgcggatcggtacggagacgtctgtacttatcttcgagaggctatatggtgttaggaaactacctttcttcatattccatcgtgcaattgatgtagtactaaatatccttctcttattctctcacagatggtgagaacacgctctaatgagattccagaccagggaagagctactcccccagttgctagaggaggcagaggccgagggagggctccagcccgtggtagagggcgaggacgtcccaggactattccagttatgccgccagtggatccagcagagaatcccattattgaggagcagggtgaggtgcctgtggcagagccagctccggtggatttcacatctgcaccgggatttcaggatgtcatgggtcgtatgctgcgattcatggacaatatgactcaggccggtttatttccggcagacccagccacatctcaggcgggcgggggagcacagacccctaccgcgcaggctcatggacaggcagctgctgtatatcagacccagggtgcactacccgtgggtggagcccagccagtggcagcagctacacctgagcccaggccagctgtagccgccgatcctcagaaactattggacagatggactagactacatcctcctgtctttgggggtgagcgacatgaggatccacaggatttcattgatcgttgcaaggatagactgtacaacatgaggatattggagtctcatggggttgactttgctacttttcagctagagggtagagcccgtagatggtggcagtcttatgctcttggcagaccagcagattctcctcccatgacttgggacaggttcacccgtatcttcttggacaggtatattccaccctcccagagggaagagttgcggtttcagtttgagcagctccagcagggtcagatgtcagtgaccgattatgaggcgaggttttctgaattatctcgccatgcactaatgatactccctactgaggcggagagagtgcgaaggtttgtagccggtttacatactggtattcaggccactatggctcgagaggttgagatgggtacttcttatgagcgagttgtggagatagcccggaggattgagggtgtacgtcagcggagccgagagcagattatgagagataagcggttcaggtactctggagagttcagaggtgctccgtctgggggcagaggtcagttcgtgaggggcagtccagcagacccccatatccagcaccaccacctcctcgaggtgctccagtgcgaccttatctcagtgctataccagagagttcttaccgcccaccagctattcagggtcctcccagtgggtattcaggtccccagggccagacacttagtcagcagcccatcgcaccgaagagttgttacgagtgcggggatcccagtcacatgcggaggttttgccccaggcttcggggtagaccagtacagcagggtcagcagcctatgcttaccggaccagttgctccaccagtagtccgaccacccagaggtggaggacaggtgggtaggggccgtcctagaggtggaggtcagccaggcggaggccagccagttggcgctccagctcggttctatgcttttccggctagaccagatgcagaggcctcagatgccgtgattacaggtattatttctgtttgtggcaaagatgcctcagtattatttgatccaggatctacgtattcatatgtgtcatctctatttgctccattcctgggtgtttctcgtgagtccttgagtactcctgtttatgtgtccactcctgtgggcgattctgttgttgtgaaccggatctaccggtcctgtattattacattctgtggttatgaaactagagcagatctcctattgcttgagatgaccgattttgaaattattctgggcatggactggttatctccatatcatgctattcaccttcttcttcacaaataatactggtgcaccttggggcgatacactcggtctgacgaaccctttggctagtaactcttaaagttgttctttcaattctttcaattcctttggagccatgcgatacggtggaataggtaaaggctgggtatctgaagccaagtcaatacagaaatcaatatcacgatcaggtagcatacttggaagatctgacggaaatacatcggagaactcccgaactgcaggcactgaatcaatagccggagtctctgcagtagtatcccaaacataggctagataagccaaacaacccttctcaaccgtgtgttgagcctttataaaagaaagaactcgattaaatgaactaacagacgaacccttccactccagcttaggcaatgctggaatagccaaggtaacagtcttggcatgacaatctagaatagcatgatatggagataaccagtccatgcccagaataatttcaaaatcggtcatctcaagcaataggagatctgctctagtttcataaccacagaatgtaataatacaggaccggtagatccggttcacaacaacagaatcgcccacaggagtggacacataaacaggagtactcaaggactcacgagaaacacccaggaatggagcaaatagagatgacacatatgaatacgtagatcctggatcaaataatactgaggcatctttgccacaaacagaaataatacctgtaatcacggcatctgaggcctctgcatctggtctagccggaaaagcatagaaccgagctggagcgccaactggctggcctccgcctggctgacctccacctctaggacggcccctacccacctgtcctccacctctgggtggtcggactactggtggagcaactggtccggtaagcataggctgctgaccctgctgtactggtctaccccgaagcctggggcaaaacctccgcatgtgactgggatccccgcactcgtaacaactcttcggtgcgatgggctgctgactaagtgtctggccctggggacctgaatacccactgggaggaccctgaatagctggtgggcggtaagaactctctggtatagcactgagataaggtcgcactggagcacctcgaggaggtggtggtgctggatatgggggtctgctggactgcccctcacgaactgacctctgcccccagacggagcacctctgaactctccagagtacctgaaccgcttatctctcataatctgctctcggctccgctgacgtacaccctcaatcctccgggctatctccacaactcgctcataagaagtacccatctcaacctctcgagccatagtggcctgaataccagtatgtaaaccggctacaaaccttcgcactctctccgcctcagtagggagtatcattagtgcatggcgagataattcagaaaacctcgcctcataatcggtcactgacatctgaccctgctggagctgctcaaactgaaaccgcaactcttccctctgggagggtggaatatacctgtccaagaagatacgggtgaacctgtcccaagtcatgggaggagaatctgctggtctgccaagagcataagactgccaccatctacgggctctaccctctagctgaaaagtagcaaagtcaaccccatgagactccaatatcctcatgttgtacagtctatccttgcaacgatcaatgaaatcctgtggatcctcatgtcgctcacccccaaagacaggaggatgtagtctagtccatctgtccaatagtttctgaggatcggcggctacagctggcctgggctcaggtgtagctgctgccactggctgggctccacccacgggtagtgcaccctgggtctgatatacagcagctgcctgtccatgagcctgcgcggtaggggtctgtgctcccccgcccgcctgagatgtggctgggtctgccggaaataaaccggcctgagtcatattgtccatgaatcgcagcatacgacccatgacatcctgaaatcccggtgcagatgtgaaatccaccggagctggctctgccacaggcacctcaccctgctcctcaataatgggattctctgctggatccactggcggcataactggaatagtcctgggacgtcctcgccctctaccacgggctggagccctccctcggcctctgcctcctctagcaactgggggagtagctcttccctggtctggaatctcattagagcgtgttctcaccatctgtgagagaataagagaaggatatttagtactacatcaattgcacgatggaatatgaagaaaggtagtttcctaacaccatatagcctctcgaagataagtacagacgtctccgtaccgatccgcaagactctattaggtctgctcataacttgtgagacctacgtgaacctagtgctctgataccatgttgtcacgacccaatttcacctataggtcgtgatggcgcccaacactacagctaggcaagccaactaataagtcaaacatacattggttaaacttttattccaagaaaataataaaataccaattctaccaatgtgtgtgccaagacccggtgtcacaagtgcatgagcatctagtagattatacaaaactccaaatactgtctgaaatgaaatagacagaatataaatataagaagagacactggtagctgcagaacggctcagaaaggcagctcaccactatgcctcgggatgacgtgggtatgtgatgataggtcctccactagtacctgtctcagatcctgcacaaaaagtgcagcaagtgtagtatgagtacgtaaacaacgtgtacccagtaagtatcaagcctaatctcgaagtggtagagacgagatggccgactttgacactcactatgggtcaataataattgaaataaaactaggatatttaaatcagcatgatttacagaatttacaataatttatttaatcagcggaaataatcaaattccttcaaatgtacaattctcaatatattaattaaattccttcaattcaaataaattccaatttatcaattaaatctcatttacaggagtaacaattaattccttaacaagcaagaataataattcattaaattccaaagatttttcaatttactaattagcttcacaagctgaaataaattattaaagcatcgtgtaattattattattattaagcacgatttctgccgaggacgtacggcccgatccagagtgtcgtgtacactgccgagggacgtgcggcgcgatccatagatgcatctatcctgccgaggcgttcggcccgctccacaagaaaggaggacattttcttatgtgcctccggaaggagagtatatttattataagataaatttgggaggagaacaatttcttttaacaattaattgatttaaacagaaatcaagcctatgagatttcatcctttaatatctttatctaacaattcacaatatattcatatagatatcaattaatataaataatcaaagaatacaatttacacaagtaaaggcatgctttgagtcctaaactacccggactttagcattaatagtagctacgcacggactctcgtcacctcgtgcgtacgtagccccccacaattagcaacaattatttaattttaatcacctatgaggtaatttccccctcacaagattagacaagagacttacctcgtcttgctccaatttaatccactataaggccttttccacgattatccaactccgtctggctcgaatctagccaaaataattcgatacaatcactaaatattataggaatcaattctataagaaaatactacattttaagaaaaatcccgaaattaattaaaaattcgcccgcggggcccacatctcggaatccggcaaaagttatgaaatccgacaacccattcaattacgagtccaaccataccagtttcactcaaatccgactccgaatcgataccgaaatctcaaaatttcgtttctatgagatttctaaacttttccaaatttcaatctcaaaacactaattaaattgtgaaaacaatgatatacttgtatatgtagaccaaatccgagttagaatcacttaccccaatgtttttcccttgaaaatctgccaaaagtcgtctctgctcaagctcaagttcgtcaaaaatggcaaatgggacgaatgccctctttttataaaactgcccagcagccttcggaactggtcctcgaactgggcctcgatcgggcttcgatcacaggctcgagcctggacctcggtcatggcctcgatcagggcatcgaggttgggccttcgatcatagcctcaatcatggcatcgagcttgagccttcgattgtgaccctcgatcttgggtctcgatcctggccctcgagccttgccttcgatcatggccctcgagctggaccttcgatcatggcttcgatacactagctcgagcctgtacctcgtcaacccttcgggctcgatatctgggctcgatatctgggctcgatcacagcccagaatgtccaacagaagaggaaaaattgcagcagctttttaactcaaatttttgatccgttaaccatccgaaactcacccgaggccctcgggacctcaaccaaatataccaacaagtcctaaaacatcatacgaacttagtcgaacctctaaatcacatcaaacaacgctaaaaccatgaatcataccccaattcaagcttaatgaaactaagagttttcaacttctacattcaatgtcggaacctatcaaatcaactccgattgacctcaaattttacacacaagtcataaattacataacggagctatgaaaattttcggaactggattccgactccggtatcaaaaagtcaactcatcggtcaaacttccaaacttaaattcttgtttttagccatttcaagcctaatttaactacggacttccaaataaaattccgaacacgctcctaagtccaaaatcaccatacggagctgttggaatcatcaaaattctattccggggtcgttttctcaaaatgttgaccgaagtcaaacttagcactttaaggccaacttaaggaaccaagtgttccggtttcaacccaaacacttccaaatcccgaaccaaccatccccgcaagtcataaatcattacaagcacctacggaagttttattttagggaacggggttctaaaagttaaaatgaccggttgggtcattacatttacatactggtattcagccactatggctcgagaggttgagatgggtacttcttatgagcgagttgtggagatagcccggaggattgagggtgtacgtcagcggagccgagagcagattatgagagataagcggttcaggtactctggagagttcagaggtgctccgtccgggggcagaggtcagttcgtgaggggcagtccagcagacccccatatccagcaccaccacctcctcgaggtgctccagtgcgaccttatctcagtgctatcccagagagttcttaccgcccaccagctattcagggtcctcccagtgggtattcaggtccccagggccagacacttagtcagcagcccatcgcaccgaagagttgttacgagtgcggggatcccagtcacatgcggaggttttgccccaggcttgggtagaccagtacagcagggtcagcagcctatgcttaccggaccagttgctccaccagtagtccgacacataaccagtccatgcccagaataatttcaaaatcggtcatctcaagcaattggagatctgctctagtttcataatcacaaaatgtaataatacaggaccggtagatctggttcacaacaacagaatcgcccacaagagtggacacataaacaggagtacgcaaggactcacgagaaacacccaggaatagagcaaatagaggtgacacatatgaatacgtagatcctggatcaaataatactgaggcatctttgccacaaacaaaaataatacctgtaatcacggaatctgaggcctctgcatctagtgtagccgaaaaagcatagaatcgagctggagcgccaactggctggcctccgcctggctgacctccacctctaggacggcccctacccacctgtcctccacctctgggtggtcgaactactagtggagcagctggtccagtaatcataggctgctgaccctgttgtactggtctacccctaagcctggggcaaaacctctacatgtgactatgatccctgcactcgtaacaactcttcggtgtgatgggttgctgactaagtgtctggccctggggacgtgaatacccactgggaggaccctgaatagatggtgggcggtaagaactctctgggatagcactgagataaggtcgcactggagcacctcgaggaggtggtggtgttagatatgggggtctgctggattgccccctcacgaactgacctctgcccccagacggagcacctctgaactctccaaagtacctgaaccgcttatctctcataatctgctctcggctccgctggcgtacaccctcaatcctcctgctatccccacaactcgctcataagaagtacccatctcaacctctcgagccatagtggcctgaataccagtatgtaaaccagctacaaaccttcgcactctctccgcctcagtagggagtatcataagtgcatggagagataattcagaaaacctcgcctcataatcagtcactgatgtggctgggtctaccggaaataaaccggcctgagtcatattgtccatgaatcgtagcatacgacccatgacatcctgaaatcctggtgcagatgtgaagtccaccggagctggctctaccacaggcacctcaccctactccttaataatgggattctctgctggaaccactggcggcataattggaatagtcctgggatgtcctcgccctctaccacgggctggagccctccctcggcctcggcctctgcgtcgacctctagcaactgggggaatagctcttccttggtctggaactttattcgagtgcgttctcaccatctgtgagaaaataagagaaggatttttagtgctacattagttgcacgatggaatatgaagaaaggtaatttcctaacaccctatagcctctcgaagataagtacagacgtctccgtaccgatccacaagactctattaggtctgctcataacttgtgatacctacgtgaacctagtgctctgataccatgttgtcacgacccaatttcacctgtaggtcgtgatggcgcccaacactacagctaggcaagccaactaataaattaagcatacattgataaaatttaaaaccaagaaaccccaaactctaccaacgtgtgtgccaagacctggtatcacaagtgcataagcatatagtagatgatacaaaactccaaatactgtctgaaatgaaatagatagaatgtaaatataagaagagacactggtagctgcagaacagctcagaaaggcagctcatcactatgcctcgggatgacgtggatatgtgatgataggtcctccactagtacctgtctcagatcctgcacaaaaagtgcagcaagtgtagtatgagtacgtaaacaacgtgtacccagtaagtatcaagcctaatctcaaagtggtagagacgagatggccgactttgacactcactatgggtcaataataataatgaaataaactagaatatttaaatcagcatgatttacagaatttacaataatttatttaatcagcgaaaataatcaaattccttcaaatgcaacaattctcaatatattaattaaattccttcaattcaaataatttctaatttatcaattaaatctcatttacaggaataacaattaattccttaacaagcaagaataataattcattaaattccaaggatttccaatttatcaattagcttcacaagctgaaataaactattaaagtatcgtgtaattattattattaagcacgatttctgtcgaggacgtacggcccgatccagagtgtcgtgtacactgccgagggacgtgcggcgcgatccatagatgcatctatcctgccgaggcacctccacaagaaaggaggacattttcttatgtacctccggaaggagagtatatttattataagataaattcgggaggaagaataatttcttttaacaattaattaatttaaacagaaaatcaagcatatgagattttccatcctttaatatctttatctaacaattcacaatatattcatatatatcaattaatattaattaatcaaagaatacaatttacacaagtaattcatgctttgagtcctaaactacccggactttagcattaatagtagctacgcacggactctcgtcacctcgtgcgtacgtagcccccacaaattagcaacaattatttaattttaatcacctatgaggtaatttccccctcacaagattagataagagacttacctcgttttgctccaatttaacctactagaaggccttttccatgattatccaaccctgtccagctcgaatctagccaaaataattcgatataatcactaaaaattataggaatcaattctataagaaaatactatattttaaataaaaatcccgaaattaattaaatattcgtctgtggggacaatatctcggaatccggcaaaagctatgaaatccgacaacccattcaattatgtgtccaaccataccagtttcactcaaatccgactccgaatcgataccgaaatctcaaaaattcgcttctatgagatttctaaatttttttcaaatttcaatctcaaaacactaattaaatggtgaaaacaatgatatatttgtgtatatagaccaaatccgagttggaatcacttnnnnnnnnnnnnnnnnnnnnnnnnnnnnnnnnnnnnnnnnnnnnnnnnnnnnnnnnnnnnnnnnnnnnnnnnnnnnnnnnnnnnnnnnnnnnnnnnnnnnnnnnncgcctctgctccagctccaatttgttaaaaaagttggtattggttcaacttttcaacttttgcacacaagtcatacatgacataacggagctgtgaagattttcagaactcgattccgaccccgatatcaaaaagtcaactccgcggtcaaactttcaaactttaaattcttatttttgccatttcaagcctaatttcactacggacttccaaataaaatttcgatcacgctcctaagtccaaaatcaacatacggagctgttggaattatcaaaattctatttcggggtcgtttgcacataattagacatccggtcactatttgaacttaaacttttaaatttttcatcaaaattccatatctcaggctagggacctcggaatttgattacgggcttatgcccgagtcccaagttatgatacggacctatcgaaactgtcaaaacactgatccaagtccgtttgctcaaaatgttgaccaaagtcaactcaattgagttttaaagctctaattcacattttaatccattttttacataaaagcttttcagaaatctttacggattacgcacgcaagtcgaggaatgataaatagtatttttgaggtcttagaacacataattaattattaaatttaaagatgatattttgggtcatcacaggtacaaactttaagaaactcaatttagaaaaattctataactcactttctgtaactaatggaaaaagagaagattgcataaacaacgcagccataagtaaaacaaatgatcagttgatacaaattgagattaatattaagaaaccaaattgaggaaaatacataacaagagaaagaaactcactttctgtataaacaatggagcaataagcaaagcaaattatcatggatgcaaatttgaatcaagaacgtcaaaagatagaaactttaagaaacccaattgagaaaaaaatggcaaataagagaaacccattaacctttctgtaccaggtgacctttaataacacaacccaagaagaaaatgcaagaaattcccttttgcttcttgaggaagcttaaaattacagggaagggtaatgtacttcaatcttctaggtgacgtgaattgggattcaattaggggaatgtgaattaaaaaaaatcccactcatgaaataattagttgatttaccagttgaaaaccctaatacaaagaacaatcgaagccacaaagcctaataaagataaattttggttaaaacccagaagtatcaaagggatttaagctgtagaggaacatgtaaagaaataaaataatttctaattaacagattataccttttgaatcctgaaaatttctctttcttagacgcaggtattgggtcaatggagaagaaaatttcaggggtgctggatttggtaccggtagaaccgagcgacttagtggtggagatggagattttgacgggtctatagagagggtggagatttcgacggttctttcttatgccctttcaaaatagtgaaaattttcactgaaagaaataatggagggaaatttttgatgaaattttttcctttattttttagcacacttattaagtgttgtttttgtgattaaaaagatagcatgctttaaaagcgtggtatataagtgaataagtattgccaaatattttatgatttggcaatacttaaaacgcattttcttcacgtttagaaagtacactttagaaacttagcttaaacttccgtggccaaaagatcaaaataaaggcttacacttataaagcgttcccatagatattattggcaatgctttccgagcgttgtctaaaattagtgtagtcttaggccaaatttgttgtagtgtgaattaaaacatttcttcaagctgatcccttaaagcattggttgttaattagaaacctttcctctatttcaaaagtcaaaaggtttaattaaaatatatttgctctaatttgcattttaagaaaattatggagtatctcattcaatgatgtatctctcgatcgggaggatttacacnnnnnnnnnnnnnnnnnnnnnnnnnnnnnnnnnnnnnnnnnnnnnnnnnnnnnnnnnnnnnnnnnnnnnnnnnnnnnnngttctgattagttgttacttgttaggaatactctgtctaacacttcatagtttggggcttccacatgttcccatgaaagtgtaggcttccacttcacttctgcaattttaaaacttattataattaatcatggaattgttttgctttnnnnnnnnnnnnnnnnnnnnnnnnnnnnnnnnnnnnnnnnnnnnnnnnnnnnnnnnnnnnnnnnnnnnnnnnnnnnnnnnnnnnnnnnnnnnnnnnnnnnnnnnnnnnnnnnnnnnnnnnnnnnnnnnnnnnnnnnnnnnnnnnnnnnnnnnnnnnnnnnnnnnnnnnnnnnnnnnnnnnnnnnnnnnnnnnnnnnnnnnnnnnnnnnnnnnnnnnnnnnnnnnnnnnnnnnnnnnnnnnnnnnnnnnnnnnnnnnnnnnnnnnnnnnnnnnnnnnnnnnnnnnnnnnnnnnnnnnnnnnnnnnnnnnnnnnnnnnnnnnnnnnnnnnnnnnnnnnnnnnnnnnnnnnnnnnnnnnnnnnnnnnnnnnnnnnnnnnnnnnnnnnnnnnnnnnnnnnnnnnnnnnnnnnnnnnnnnnnnnnnnnnnnnnnnnnnnnnnnnnnnnnnnnnnnnnnnnnnnnnnnnnnnnnnnnnnnnnnnnnnnnnnnnnnnnnnnnnnnnnnnnnnnnnnnnnnnnnnnnnnnnnnnnnnnnnnnnnnnnnnnnnnnnnnnnnnnnnnnnnnnnnnnnnnnnnnnnnnnnnnnnnnnnnnnnnnnnnnnnnnnnnnnnnnnnnnnnnnnnnnnnnnnnnnnnnnnnnnnnnnnnnnnnnnnnnnnnnnnnnnnnnnnnnnnnnnnnnnnnnnnnnnnnnnnnnnnnnnnnnnnnnnnnnnnnnnnnnnnnnnnnnnnnnnnnnnnnnnnnnnnnnnnnnnnnnnnnnnnnnnnnnnnnnnnnnnnnnnnnnnnnnnnnnnnnnnnnnnnnnnnnnnnnnnnnnnnnnnnnnnnnnnnnnnnnnnnnnnnnnnnnnnnnnnnnnnnnnnnnnnnnnnnnnnnnnnnnnnnnnnnnnnnnnnnnnnnnnnnnnnnnnnnnnnnnnnnnnnnnnnnnnnnnnnnnnnnnnnnnnnnnnnnnnnnnnnnnnnnnnnnnnnnnnnnnnnnnnnnnnnnnnnnnnnnnnnnnnnnnnnnnnnnnnnnnnnnnnnnnnnnnnnnnnnnnnnnnnnnnnnnnnnnnnnnnnnnnnnnnnnnnnnnnnnnnnnnnnnnnnnnnnnnnnnnnnnnnnnnnnnnnnnnnnnnnnnnnnnnnnnnnnnnnnnnnnnnnnnnnnnnnnnnnnnnnnnnnnnnnnnnnnnnnnnnnnnnnnnnnnnnnnnnnnnnnnnnnnnnnnnnnnnnnnnnnnnnnnnnnnnnnnnnnnnnnnnnnnnnnnnnnnnnnnnnnnnnnnnnnnnnnnnnnnnnnnnnnnnnnnnnnnnnnnnnnnnnnnnnnnnnnnnnnnnnnnnnnnnnnnnnnnnnnnnnnnnnnnnnnnnnnnnnnnnnnnnnnnnnnnnnnnnnnnnnnnnnnnnnnnnnnnnnnnnnnnnnnnnnnnnnnnnnnnnnnnnnnnnnnnnnnnnnnnnnnnnnnnnnnnnnnnnnnnnnnnnnnnnnnnnnnnnnnnnnnnnnnnnnnnnnnnnnnnnnnnnnnnnnnnnnnnnnnnnnnnnnnnnnnnnnnnnnnnnnnnnnnnnnnnnnnnnnnnnnnnnnnnnnnnnnnnnnnnnnnnnnnnnnnnnnnnnnnnnnnnnnnnnnnnnnnnnnnnnnnnnnnnnnnnnnnnnnnnnnnnnnnnnnnnnnnnnnnnnnnnnnnnnnnnnnnnnnnnnnnnnnnnnnnnnnnnnnnnnnnnnnnnnnnnnnnnnnnnnnnnnnnnnnnnnnnnnnnnnnnnnnnnnnnnnnnnnnnnnnnnnnnnnnnnnnnnnnnnnnnnnnnnnnnnnnnnnnnnnnnnnnnnnnnnnnnnnnnnnnnnnnnnnnnnnnnnnnnnnnnnnnnnnnnnnnnnnnnnnnnnnnnnnnnnnnnnnnnnnnnnnnnnnnnnnnnnnnnnnnnnnnnnnnnnnnnnnnnnnnnnnnnnnnnnnnnnnnnnnnnnnnnnnnnnnnnnnnnnnnnnnnnnnnnnnnnnnnnnnnnnnnnnnnnnnnnnnnnnnnnnnnnnnnnnnnnnnnnnnnnnnnnnnnnnnnnnnnnnnnnnnnnnnnnnnnnnnnnnnnnnnnnnnnnnnnnnnnnnnnnnnnnnnnnnnnnnnnnnnnnnnnnnnnnnnnnnnnnnnnnnnnnnnnnnnnnnnnnnnnnnnnnnnnnnnnnnnnnnnnnnnnnnnnnnnnnnnnnnnnnnnnnnnnnnnnnnnnnnnnnnnnnnnnnnnnnnnnnnnnnnnnnnnnnnnnnnnnnnnnnnnnnnnnnnnnnnnnnnnnnnnnnnnnnnnnnnnnnnnnnnnnnnnnnnnnnnnnnnnnnnnnnnnnnnnnnnnnnnnnnnnnnnnnnnnnnnnnnnnnnnnnnnnnntagtgcactgtaaactggagcactccgagtaatctgatgtgcggactgagctgaccgactgctcgagcctcctctataatgggtcctatctgaagagtaaaatccactgaaccctccagatcttcgagaccttttggcctccttagactnnnnnnnnnnnnnnnnnnnnnnnnnnnnnnnnnnnnnnnnnnnnnnnnnnnnnnnnnnnnnnnnnnnnnnnnnnnnnnnnnnnnnnnnnnnnnnnnnnnnnnnnnnnnnnnnnnnnnnnnnnnnnnnnnnnnnnnnnnnnnnnnnnnnnnnnnnnnnnnnnnnnnnnnnnnnnnnnnnnnnnnnnnnnnnnnnnnnnnnnnnnnnnnnnnnnnnnnnnnnnnnnnnnnnnnnnnnnnnnnnnnnnnnnnnnnnnnnnnnnnnnnnnnnnnnnnnnnnnnnnnnnnnnnnnnnnnnnnnnnnnnnnnnnnnnnnnnnnnnnnnnnnnnnnnnnnnnnnnnnnnnnnnnnnnnnnnnnnnnnnnnnnnnnnnnnnnnnnnnnnnnnnnnnnnnnnnnnnnnnnnnnnnnnnnnnnnnnnnnnnnnnnnnnnnnnnnnnnnnnnnnnnnnnnnnnnnnnnnnnnnnnnnnnnnnnnnnnnnnnnnnnnnnnnnnnnnnnnnnnnnnnnnnnnnnnnnnnnnnnnnnnnnnnnnnnnnnnnnnnnnnnnnnnnnnnnnnnnnnnnnnnnnnnnnnnnnnnnnnnnnnnnnnnnnnnnnnnnnnnnnnnnnnnnnnnnnnnnnnnnnnnnnnnnnnnnnnnnnnnnnnnnnnnnnnnnnnnnnnnnnnnnnnnnnnnnnnnnnnnnnnnnnnnnnnnnnnnnnnnnnnnnnnnnnnnnnnnnnnnnnnnnnnnnnnnnnnnnnnnnnnnnnnnnnnnnnnnnnnnnnnnnnnnnnnnnnnnnnnnnnnnnnnnnnnnnnnnnnnnnnnnnnnnnnnnnnnnnnnnnnnnnnnnnnnnnnnnnnnnnnnnnnnnnnnnnnnnnnnnnnnnnnnnnnnnnnnnnnnnnnnnnnnnnnnnnnnnnnnnnnnnnnnnnnnnnnnnnnnnnnnnnnnnnnnnnnnnnnnnnnnnnnnnnnnnnnnnnnnnnnnnnnnnnnnnnnnnnnnnnnnnnnnnnnnnnnnnnnnnnnnnnnnnnnnnnnnnnnnnnnnnnnnnnnnnnnnnnnnnnnnnnnnnnnnnnnnnnnnnnnnnnnnnnnnnnnnnnnnnnnnnnnnnnnnnnagatcaattcctttaattaccaaaaaaaaaagaaaagaaggagaaatcaattgcaattcatctacattcggaagtaaaataagtcagataatagaataatatatatagtgcaaaaacatcattttccttgtgtattttgttgggtgaaaaacattttcctcaaaaaaatgtattctgcagattgtgctttgcatcgtnnnnnnnnnnnnnnnnnnnnnnnnnnnnnnnnnnnnnnnnnnnnnnnnnnnnnnnnnnnnnnnnnnnnnnnnnnnnnnnnnnnnnnnnnnnnnnnnnnnnnnnnnnnnnnnnnnnnnnnnnnnnnnnnnnnnnnnnnnnnnnnnnnnnnnnnnnnnnnnnnnnnnnnnnnnnnnnnnnnnnnnnnnnnnnnnnnnnnnnnnnnnnnnnnnnnnnnnnnnnnnnnnnnnnnnnnnnnnnnnnnnnnnnnnnnnnnnnnnnnnnnnnnnnnnnnnnnnnnnnnnnnnnnnnnnnnnnnnnnnnnnnnnnnnnnnnnnnnnnnnnnnnnnnnnnnnnnnnnnnnnnnnnnnnnnnnnnnnnnnnnnnnnnnnnnnnnnnnnnnnnnnnnnnnnnnnnnnnnnnnnnnnnnnnnnnnnnnnnnnnnnnnnnnnnnnnnnnnnnnnnnnnnnnnnnnnnnnnnnnnnnnnnnnnnnnnnnnnnnnnnnnnnnnnnnnnnnnnnnnnnnnnnnnnnnnnnnnnnnnnnnnnnnnnnnnnnnnnnnnnnnnnnnnnnnnnnnnnnnnnnnnnnnnnnnnnnnnnnnnnnnnnnnnnnnnnnnnnnnnnnnnnnnnnnnnnnnnnnnnnnnnnnnnnnnnnnnnnnnnnnnnnnnnnnnnnnnnnnnnnnnnnnnncagaaaaagagagaggcaacctgtaggctgtagccataccccatttaatttatatttcctgtctaatattgcgtgctatttttaatatattttcacctttttgaaaatctaatggacctttctttcttaaaatagaatacaaatgtttcttacatttgacagcaaatgcaatcagtaaaaccaaaagtaaaaaccaagaagtatacatatgctaagcttgcccatgaaaaaaatatttccgttataaattaactgatctcaagtaattctgaaattttaagaaatgaacnnnnnnnnnnnnnnnnnnnnnnnnnnnnnnnnnnnnnnnnnnnnnnnnnnnnnnnnnnnnnnnnnnnnnnnnnnnnnnnnnnnnnnnnnnnnnnnnnnnnnnnnnnnnnnnnnnnnnnnnnnnnnnnnnnnnnnnnnnnnnnnnnnnnnnnnnnnnnnnnnnnnnnnnnnnnnnnnnnnnnnnnnnnnnnnnnnnnnnnnnnnnnnnnnnnnnnnnnnnnnnnnnnnnnnnnnnnnnnnnnnnnnnnnnnnnnnnnnnnnnnnnnnnnnnnnnnnnnnnnnnnnnnnnnnnnnnnnnnnnnnnnnnnnnnnnnnnnnnnnnnatggcaccttcacagaaattccttacaaaaaataaaggtagggactagagctccaatcataggccaagcatataaatagacgtaggatatcaacaattctattcatccagaattaataaaccctagtaagtgaaagtgaaagaaactactcatccaaatatctatagaaaagtaaatgaatcccaataatgcaaccttctctttctctgagcttgatttccttcaatcaatagaaaaccatcttctgaattatgattccgatttttctgaaattctttcgccgatgagttcaagtaacgcattgcctaatagtcctagctcaagttttggcagcttcccttcggcagaaaatagcttggatacctctctttgggatgaaaactttgaggaaacaataccaaatctccaacttgaagaaaagtccgagtccgaggaggaaacaaaggggcatgtggtggcgcgtgagaaaaccacgacacaagattggagacggtacataggagttaaacggcggccgtgggggacgttttcggcggagataagggacccggagagaagaggcgcgagatnnnnnnnnnnnnnnnnnnnnnnnnnnnnnnnnnnnnnnnnnnnnnnnnnnnnnnnnnnnnnnnnnnnnnnnnnnnnnnnnnnnnnnnnnnnnnnnnnnnnnnnnnnnnnnnnnnnnnnnnnnnnnnnnnnnnnnnnnnnnnnnnnnnnnnnnnnnnnnnnnnnnnnnnnnnnnnnnnnnnnnnnnnnnnnnnnnnnnnnnnnnnnnnnnnnnnnnnnnnnnnnnnnnnnnnnnnnnnnnnnnnnnnnnnnnnnnnnnnnnnnnnnnnnnnnnnnnnnnnnnnnnnnnnnnnnnnnnnnnnnnnnnnnnnnnnnnnnnnnnnnnnnnnnnnnnnnnnnnnnnnnnnnnnnnnnnnnnnnnnnnnnnnnnnnnnnnnnnnnnnnnnnnnnnnnnnnnnnnnnnnnnnnnnnnnnnnnnnnnnnnnnnnnnnnnnnnnnnnnnnnnnnnnnnnnnnnnnnnnnnnnnnnnnnnnnnnnnnnnnnnnnnnnnnnnnnnnnnnnnnnnnnnnnnnnnnnnnnnnnnnnnnnnnnnnnnnnnnnnnnnnnnnnnnnnnnnnnnnnnnnnnnnnnnnnnnnnnnnnnnnnnnnnnnnnnnnnnnnnnnnnnnnnnnnnnnnnnnnnnnnnnnnnnnnnnnnnnnnnnnnnnnnnnnnnnnnnnnnnnnnnnnnnnnnnnnnnnnnnnnnnnnnnnnnnnnnnnnnnnnnnnnnnnnnnnnnnnnnnnnnnnnnnnnnnnnnnnnnnnnnnnnnnnnnnnnnnnnnnnnnnnnnnnnnnnnnnnnnnnnnnnnnnnnnnnnnnnnnnnnnnnnngcagctcgagagctcggctcaattttcctcacttaattggatcaaacatgcctaagccggctagagttacagcgagacgtagccgtacgcgctcacccgagccatcgtcttcttcatgcacctcatcatcagaaaaggggacaagaaaaaggaaaatagatttgataaattccatagccaaagcaaaatttattcgtcatagctggaacctacaaatgctgctataactgtatttggaaggaattaattaagggtattctatttttttgtattagaatttagaataatcacctaaagctcctgaaatcgggagctatgccttccaagcaaaataattagcagcaaaaaaaaaaaaaaactagcagctccatccaaattggtagagatattcctttccacggagtaaactgataaagaaaaaaattgaagaaaaaaaaatttaaaaaaaaaaactaagcccactaggaaattcaacccacaacacatgaaatataaaaaagaactgcgaaattttaaaaagaactgcgattcaaataattacaactcccaaaatccggtagaaataagtcacaatctctaaagagaaaatattgagtgtatatatacatcagagtctagtaaaataaagaaagcaacatattaaggatacagggggactccgaggtctgcggacgctggcagatataccttgaagtctccacgtacggtccagctcactggtatctagtttggtaggaagaacttggatctgcacaaaaaaagtgtagaagtgtagtatgagtacaccacaacggtacacagtaactgccaagactaacctcgatagagtaatgatgaggtcaggtcagggccctactagaataaaaaggaaacaagacacgagatataacaatataatgaaattacgaggaatttaaacaatgagaaattacagaaaaataacaacacagcgaataaaggtaaacaacaggggcgctcccgagataccgtctcgtagtcctaaatgtaaatgcacaacagggggagctcccgaggtacaacaggggcactcccgaggtaccgccttgtagtctcaaaagtaaatacactacacataacatatggaacaacaagtttacaacaaggactcatatagttaaagactcatgaatacaaaatcaaagaagcaggtaattcaactaagcatgttgcaaaaattgcaagtaagagttaagatacgtaggcatgctacattaggctaaacatgatgactacacatgctagagtaacttagttaaggaattaaaagaaaactactcagcaagaaccagattcttcaacatttaacccaagtacgcacttgtcacctcgcatacacgaccttcacgtattgcaaatataacagtaccaaaatctaaaggcaatttttcccacacaaggttagacaagtcacttacctcaaatctcgctcaatcagtcgataataatgcctttccttcgactttccgactctgaacgactcaaatctagcaaaaagaaattacatactataaatacaactacaagaaactaatttaaataataaatctacgacttagcaaagaatcgaaaaattacaccaaaatgccaacccgggcccacgtctcggaatcggataaaagtcacaaaatacgaacactcattcgataacgaatccaaccatactaaatttatcaaaatccgacaccaaatcgccactcaaatccccaaattaaactctccaaattcctagccgcaaactcccaaattccaccttaaatacaaacaaacttggtggaaaaatcaatggagaaacaaggttattgataaaaaatgagcacacgagacttacctcaagaaaaccctcgaaacgcctctcaagaatcgccaaaacccgagctcatcaaaatgtttaaaatgaagcataatcgcaaacccttgtatttaagtgttctgctagcacttccacttttgcggaaacttaaccgcttctgctgcgtcgcagaagcgaccaatcgcccgcatctgcggcttcttccactcttgcgtcccctcactccgcttcggcggactcgcttcttcgaacctccatgccgcttatgctatcctagctcgtttttccaattctgcttctgcggtcacgcatgtgcggcaattccctcgcacctgcggccaactgcatacccaatccaaaactcacacctgcgcattccagtctgcacctacgggctcgcacctacgatcaaagctctacaggtgcggttacaccagcagagcctagtcttcatcaatttctcaactttaactcgatccgttaaccatacgaaatcaacccgaggcctccgggacctcaaccaaacataccaacaagtcctaaaacaccatacgaacttagtcaagtctttaaatcacatcaaataacgctaaaaatatgaattgcacatcgattcaagcctaataaactttagtaaatttaaacttctacattcgacgccgaaacctatcaaatcaagtccgattgacctcaaattttgcacacaagtcataattgccattacggacctactccaactttcggaatcgaaatccgaccccgatatcaaaaagtccactcccggtcaaactttcaaaaaattatccaattttccaactttcaccagttgacgctaaaatgacctatggacctccaattcaacatccgaacacgctcctaagtccaaattcaccctccggagctattgggaccttcgaaactccattccagattcgtgtttacacaaataaacctacaattaatttctacgacttaaacttccattttaaggactatgattcccattttactccgaagccaaaaataaattctcctcgtaagtcacaaaacccaaaaatgaaatagagggagaaataaataggggtttggggctaatactctcaaaacgagcagccgggtcgttacatcctccccctcttaaaataaatattcgtcctctaacgagtatagggacatacctgaagtggggacaagatgaggatatcgtctacgcatatcaagctcggtctcccaagtcgtctcctcgacctgatgacccctccactacaccttcactgacgcgatgttctttgacctcaactttcggacctgcctgtccaagatggccaccggctcctcaacataagatagatccttgtctaactagactgagctgaagtctaacacatgagacggatcgacgtgatacttccggagcatggaaacatagaatactggatgaactgcagcgagactaggtgattgtgcaagtctgtaagccacctctccaaccctctcaagaatctcaaaaggcccgatatatctagggctcaacttgccttcctcccgaacctcataacacccttcatgggcataatccggagcaagatccgctcctcaaccatgaatgcaatgtcactaaccttccgatccgtataaactttctacctggactaggctgtacgaagttgatcctgaatcaatttaaccttttccaaagtatcctgaaccaggtctgtacccaataacctagcctcacccggctcgaaccagcccactggagatcgacaccgtctaccatatagagcctcatacggtgccatctgaatgcttgactgataactgttgttataggcaaactctgcaagtggcaagaatagatccaaaacacccccaaattctatcacgtaggtacgaagaatgtcctccaatatctgaatagtatacttgggttgtacgtccgtctgagggtgaaatgttgtgctcaactccacccgagtaccaaactcatactgtacggctctccagaaccgcgatgtaaactgcgtaccccggtcagagatgatagataccggtacaccatgaagcctgacaatctcgcgaatgtaaacctgagctagctgctacgaagagtaagtagtaaccacaggaatgaaatgagatgacttggtcaatctatccataatcacccaaactgcatcgaacttcctctgagtctgtgggatcccaacaacaaaatccatagtgatccactctcatttccactctgaaatctctaactactgaagcaatccatccagtcgttgatgctcatacttcacctgctgacaatttaggcaccgagctacatgttccactatgtccttcttcatccgcctccactaatagtgctgcctcaggtcctgatacatcttcgcggcacctggataactggagtaccactaactgtgagcctccgggagaatcaactcacgtaatccatctatattgggcatacatagcttgccttacatctataatacaccgacatcttcaattgtgacctccttggcattgccatactgaaccgcgtcattaaggacaaacagataggggtcatcatactgacgctctctgatacgataataaagagaagattgcgaaaccatacaagccaaaactcacctcggctcagaaacatccaatatgacaaactggttggccaaggcctgcacattcaaggctaaaggcctctctcctactggtaaatatactaaactgcccaaactccccgccttgcgactcaaggcatcgaccaccatattggcctttttgggatgataaaaaattgtgatgtcatagtccttaagaggctccaactatctccactgtcgcaagttaagatccttctatttaaatagatgttgtagactccggtgatcggtgtagacctcacaagggacaccatacaaataatgacgctagaccttcaaggcatgaacaatagatgctaagtcgaggtcatggacatgatagttcttctcatgcaccttcagttgtctagatgtgcaggcaatcaccctaccgtcctgcatcaacgttgcaccgagaccaatgcgcgacgtatcacaatacaccgtataggaccccgattaagtaggcaacactaacattggggttgtagtcaaagcaatcttgagcttttgaaagctctcttcacaatccttggtccacctaaatggagcacccttctgggtcaatctagtcaaaggtgcatcaatatacgagaaaccctctacaaatcgatggtaataacctaccaagccaagaaaactccggatctccatagctgaggacgacctgggccaactctgcactgcttcaatcttttttggatctaccttgatcccctcactcgatactacatgacccaaaaggccactgactttagttagaattcacacttcaaacatttttcatataactttttttccctcaaagtttgaagcacggtcctcatatgcttctcatgatcctcccgacttcgagagtacaccagaatgtcatcaataaacacaatgacaaaagagtcaagatagggctgaaacatactgttcatcaagtacatgaacgctgatggggtgttggtcagcccaaaagacatcacaaggaactcgtaatgaccatatcgagtcctaaaagtagtcttcgggatatttggctcccgaatctttaactgatgatagcttgaacgcaagtcgatcttagagaacactttggtaccctgaagctgatcaaataggtcatcaatacgtggcaatggatacccgttcttcactgtaaccttgttcaactggcgataatcaatatacattcgcatagaaccatccttcttctttacaaacaagacaggagcaccccaaggcgacacactaagccaaataaagcccttatcaataaactcttgcaattgttcatttaattctttcaactctggtagggccatacgataaggtggaatagaaataggcttagtgcccagtaacaaattaatgccaaagtcgatatccttgtcgtgaagcatgcttggaagatctgccgggaaaatatctgaatagtacctcactaccggaactgactcaatggtaggagcatgaacactaaaatccctcacatattccagataagcatcacaccccttctcaaccattcgctgagccttaagaaatgagataccctactaggaacatgatctaaggtacctctccattctagtcgcggtagacatgtccaacatcaccatcttggcgtgacaatcaagaatagcgtgatagggcgacaaccagtccatgcccaaaataatatcaaaatctaccatactgagcaataataaatcggctctagtctcaaaaccactaataaccatcaaacttgaccgatacacacggtcaacaacaaatggaatcacccacgggtgtagacacatagacaggagaacttagagaatcgcgggatatacccaaatatgaggcaaaataagatgacacataggaataagtggagtctagatcaaataagactaatgcatctctatgacagaccggaacaatacatgtgatgacagaatcagatgaaactgcctctgacctagacggaagggcataatatctggcctggcctcctcttctagggcaacctctacctgtccgacctccacctctagatggctgtgcaggtggggtggtagctagtgttgtaactatagcctgaggactcggtggagcacgcgatgcatgagtggtctgcgaaggtgcacccctcctgagtctggggcaatccctcaccacataacgagtgttactacactcaaaaaaagatctcggaggacatggctactgtgactagctcggggctgattggttggactgaccgctgaaagcaccccatgcaggaggtgcactagacaatggcggtgtataataaggagcctattgatggtaggttataattgcatgttttagtttctcatcgcactctaatttacttcactttaattgactttaagccttaattgctagtgttttgcactaattatgtgttttatgtcttgtaggagtgattccaagttgtgtagatattgtggcataatttcatgctattttggagctttgaagtctgataaaaacccaaggattaagttgggatcgagttcggggatcaacagacactagtgcacttaatgagaaaatcgaaaaatcgagaaggacgtcacccaggtgtgcgagcgcgaactgggcgcacatgtgaggcagaagaccatccaaagtgcgcagccatatgcacgagcacactcccaggtgcgctgccgtgcacgttcaactctggaaagagtcctattatgcgtaggagaaggtgtgttcatttgggcccgaccctacttggtatatatacatggagaaacgatatgtttggggcttttgacacatctaagacctaatgaagctaagaagaagtgggggaagcaagagcacaaggattgcatgattcaatcctcactcaagacaagagtttggatcgattattctttcctttaacttaaacttatttgtgatgaattactccatatctatggagtagttctctttagggattgatggattttgtgtattgatatttgcttgtggattattaactgtaatttgtatgtattgaatcgttttgggtattttaattattgcatctattttcacatgttcatgcaatcgagagaggcataacttgtgacatagttgtgttatcttgttggttgagtttattaggtttcttagtaatcgaaagaggctaattgaattattgtttaaccctagttaggaggataatcgagagaggttctcctaaagaccaatccactacaaattcttgcatatcttcactgagcttaaattggttcatattgtgaggttgagacttaatcgagagaggagtttctactaaacggttgaactnnnnnnnnnnnnnnnnnnnnnnnnnnnnnnnnnnnnnnnnnnnnnnnnnnnnnnnnnnnnnnnnnnnnnnnnnnnnnnnnnnnnnnnnnnnnnnnnnnnnnnnnnnnnnnnnnnnnnnnnnnnnnnnnnnnnnnnnnnnnnnnnnnnnnnnnnnnnnnnnnnnnnnnnnnnnnnnnnnnnnnnnnnnnnnnnnnnnnnnnnnnnnnnnnnnnnnnnnnnnnnnnnnnnnnnnnnnnnnnnnnnnnnnnnnnnnnnnnnnnnnnnnnnnnnnnnnnnnnnnnnnnnnnnnnnnnnnnnnnnnnnnnnnnnnnnnnnnnnnnnnnnnnnnnnnnnnnnnnnnnnnnnnnnnnnnnnnnnnnnnnnnnnnnnnnnnnnnnnnnnnnnnnnnnnnnnnnnnnnnnnnnnnnnnnnnnnnnnnnnnnnnnnnnnnnnnnnnnnnnnnnnnnnnnnnnnnnnnnnnnnnnnnnnnnnnnnnnnnnnnnnnnnnnnnnnnnnnnnnnnnnnnnnnnnnnnnnnnnnnnnnnnnnnnnnnnnnnnnnnnnnnnnnnnnnnnnnnnnnnnnnnnnnnnnnnnnnnnnnnnnnnnnnnnnnnnnnnnnnnnnnnnnnnnnnnnnnnnnnnnnnnnnnnnnnnnnnnnnnnnnnnnnnnnnnnnnnnnnnnnnnnnnnnnnnnnnnnnnnnnnnnnnnnnnnnnnnnnnnnnnnnnnnnnnnnnnnnnnnnnnnnnnnnnnnnnnnnnnnnnnnnnnnnnnnnnnnnnnnnnnnnnnnnnnnnnnnnnnnnnnnnnnnnnnnnnnnnnnnnnnnnnnnnnnnnnnnnnnnnnnnnnnnnnnnnnnnnnnnnnnnnnnnnnnnnnnnnnnnnnnnnnnnnnnnnnnnnnnnnnnnnnnnnnnnnnnnnnnnnnnnnnnnnnnnnnnnnnnnnnnnnnnnnnnnnnnnnnnnnnnnnnnnnnnnnnnnnnnnnnnnnnnnnnnnnnnnnnnnnnnnnnnnnnnnnnnnnnnnnnnnnnnnnnnnnnnnnnnnnnnnnnnnnnnnnnnnnnnnnnnnnnnnnnnnnnnnnnnnnnnnnnnnnnnnnnnnnnnnnnnnnnnnnnnnnnnnnnnnnnnnnnnnnnnnnnnnnnnnnnnnnnnnnnnnnnnnnnnnnnnnnnnnnnnnnnnnnnnnnnnnnnnnnnnnngagagactcacttgaacattagaagtgaattaactagagttaaatccagacatttatcttgcacctatccaatcaatccctattttcttccatttgatatcttctttactcattgttgtgattgtcattactcaatagtttatacttttagtaaaaaaaaaatttaaatcacacaaatctaattgtcgatcgtcgtggatagtaattaaactagaagctacaaaaatactgtttaaatcaaatccttgtggatacaatatttttctatactatattcgaccagcgagcctatgttttatacatcagtttgtgccggggattggcaattaatagtgtttgaaatagtttgtagtgttaattcagaaaaaaaaattcttttatttttttcttttttcgtttagtgttacttgattgtgtgcagactgcaggttaaattggtgcatgactcgatcctcttggaaggaagtgatcccatatgaactagaaatcgagaaataactgcgacagttgaggaaggaaagaaatctccccgagaatacagagaaggttggacaatcctcaaccaaggaagttatggtgggagataatgataatgttgatttggctgcaagagaggcagcccagcaaagagaaaaagctgtatgagatgctgaagagacaactcttcaaaatgcacaacttgtcaatgaagaggagagggctcggagaattgctcagaatctacctttgggtgtagaccaattcagaaatatagctcccggtgctgggagaccattaggtgattattctatatcgatctacaaccaagacttatcaagtgtaaaactgtctccaattgcagctaacaattttgagttaaagcaagggttgcttcaaactcttcaaaatagccgtgtcttcacttgaaagataaacgaagatccaaacaatcatctgatggacttcaccagattatgaacacctttcaatacaacggtgtgtcacaaaatgcagtatacttaagggcattccctttcacactcaaagaagatacaaagcactggcttcgaagcttgcctaatggatcgattagaacatgggatgagatgaccagaacatttcttgacaaatatttctcatcagctaagacgagcaagtttagaagagaaatccataacttcttccagaacgagactaaaactatgtttgaagcttgggagaggtttaaggagatagtgcgaaagtgtcaacatagcggaattgaactctagatgcaactctaggacttttggtatggattgacacccgccgctcggagaacattgagcaatgcaactggaggttcgttgatgaagaagactttagaggatatagtcacaattctaaataagttatctgaagacgcaaatcagtagccctctgagatttctgaaagaagaagatcaactgttgttcaccaagtcgatgctaacacatctatgcaggtacaacttgatgccatggccaaggaaataagggagttgaccttagcttcaatacacagtgagccatatgcagcgtgtgatatatgtgtaagagggaaccctactcatgagtgccaagcctcaatcgaggaagataatgctatcgggaattataacttcaatgcaatgggtcataagcactttgatttttcatggagttcacttgggggtacgacaaacgcatggcaacaaaacaatcccagatttcaaggagctcctggttttgtgaattagccgaggctgcaattccagcctcaatattccactcagcctgggctagaagatctaatgaagtccttcaatgtcaagacagatgagagattagatggtcatggtttatctatcaaagaacttggtactggttttcaaaacttggagaagaaagtgggacaaattgcaactgtattgtctgagaaaatcccaggtactctaccagctgacactgaagaaatcccaaggaaacggtgaatgttgtgaccttgagaagcgggcaagtgttgaaagatcccgaccctgtccaacaagagagtttacctgaaaaagaagttgaaaagcagctgaaaatgaagttgataagaagaataaaggcaagaaaagagttgagaaaaagaagaaggatgagacttcaagaaggcaggaatctaatgagagcgagcatatgcctgctctaccctttccccaaaagttatatagagaaaagctggacaagtagtttgagagatttttagatatgctgagacaggttaatgtaaatttaccattcacagaagttctctcacaaatgccagcttatgccaaattcttgaaggagatccttacaaagaagaggaagatagaagacacctcagtggtcaagctcacagagcattgcagcacaatcttgcaaaacaaactcccacaaacgtgtggagatctagggagttttactataccttgctcgttaggcactcttaattttgataaatctttatgggattctggtgcctcaattaatttaatgcctttgtctatttacaagaagctggataatgagcttggagagataaggtctgtgctaaaatctttgcagctggcagaccaaagaactataatacccaaggagatagtggaagatgtcttagttcgggtagataagtttgtatttcatgtagatttcattgtggtgaagatggaggagaacaaagaggtccaccttatcttaggaagaccattcttagcaacgggcagagcaatattagacatacatgatagaaagctcatacttagaatgagtgaggagacggtgaattttgagatgaatgtagagatgggggtgagaaaggaaaagttaactgcaattgttgagtggaaggtgaagagctcaaaagagaagtcccagtgattgagaaatacaagtgtggggagtaccctaagaaggctgggaagaagctatctgcgtggatgtgtgcactagttcgggaacgaagaatggtgcccgactttgactcagaccccgactagagattcagggaggtttcctctacctcatgccttttaattgtgtgtcatgggtacatgccacaacttaaagtgtggggtggaggatatttgtatgttgtatgtatatgtatttctttttgcttagttataaaagtttgatggaaattgttttttggaaaaccataaaaaaaaattaaaattttcgattttttccaatgatggatatcattcgacaggtttcttgagggataaagttgaaagaaaaagacaaaaagatttttttagttagtgtattacccttggtttttctttgtgccgcggttcttttccaggggttttgtttgaaccgggtgtagttagtttttatttttgttaggagtagaaaactttgtgctatgatttgaattggaagcaatatttcttgactatgttataccttgagaatagtgagtgctctggttgtgatgcttaggctttgtttttcactctcgtagaggtaccttaaattgtatgtttttaactttgcttaactattttgactagagtgtcttgataatccaatcttgagtgagttatatgccatgtgtgtgagagattttggtgtattcggtgcattgcatttgatgtctagaatattccccgtgtgtttgcaaagcgaaatagtagttttattcagtcttggaagtgatataggcatttctttgttgagatagttatatgttattacccaccagattgttatgtatcatagttaaccccgttgagcctgtagtcctgtttctttggaaaccacattacaagacttacccttttgtttgaattgaccatctatttgaaccatttacttctcatgagcacttgacattgttatgaactgtgtaaaagttaaagtgtggggtgattggtttggcttttgagtggaactaatgaattaaggagacaggtgcactgttttgaaaaagtaagagccacttaaattgaaaacgaaaagcaatatagttgtattgttgtgaaaattattcattgataggtaggaactcttgatgtaatagtgcttaaagaagttgggagttaatatatgtggatgtgaaggtggagtcttggtttgacataagtgtggggttttgaatgaaatgtatgtattaaagtacttaaggaggtgtagacactcttatatataaatgtatcctacccattccgcaacctacattacaaccaaataaagtcctacttgatccttgactgaatgagctcgaattagtagagtagtacactacgggcaagcctatgatacatattttgtggcatatgaatgttgtttctgagagtgagcgagttctttctatcttgagttcctaattgttcttaatttctatgttgtgtggaactaccctctattgttatgtgagggcaattgattcatgaaataaaagtaatgtcgttgacctctaggttagagtaagtgagtgagttgtaaataatatgtggtacttgcgagtcaaatgttgagactaggatgttacactattgtgcttaatctattttaaatattcttggtatgatgagttatgagagttgtgtgatgaggtagtgtctatataaagtgtagtttgattgctcgaggacgagaaatggtttaagtgttgggtgtttatggtaggatataattgcgtgttttagttgcttactataatttactgcactttaattgagtttgagccttaatcgctagtgttttgcactaattatatgttttatgccttgtaggagtgattccaagctatttcgatattgtggcatgaattcatgctattttggagctatgaagtcttagaaaaaccctaaggattaagttgggatcgagttcagggatcaacggacactagtgcacttaatgagagaaacgaaaaatcgagcaggacgtcacccagatgcgtgagcgcgcactgtgcgcacatgtgaggcataagaccatccaacgttcatggccatatgcgcgagcacactcccaggtgcgtggccgcgcacgtccaactctggaaagagtcctatttcgcgtaggagaaggtgtgttcgtttgggtctgaccctacttggtatatatacatggagaaactgtatttttgggacttttgacacatctaagacctaaggaggctaagaagaagtgggggaagcaagagcataagggtttcatgattcaatcctcactcaagacaagagtttggattgtttatgctttcctttaacttaaacttatttgtgatgaattactccatatctatagagtagttttctttagggactgatggatttggtgtattgatatttgtttgtggattattaactctagtttgtatgtattgaggttttggttgttttaattgttgcatctattttcacatgttcatgtaatcgagagatccataacttgtgacatagttgcgttatcgtgttagttcaattcactaattcttcttagtaatcgaaagaggctaattgaattattgtttaaccctagttaggaggataatcgagagaggatctcctaaaggtcaatccactacgaattcttgcatatcttcattgagattaaattggttcatattgcgaggttgaaacttaatagagagaggagtttctactaaatggttgaactaataattgagtgaattcgagagactcacttgaacattagaagtgattaactagatttaaatcccacaaatttatcttgcacctattcagtcaatccctattttctcccattgatgtcttccttattcattgttgtgattgccattagtcaatagtttagacttttagtaaattttagttttaaatcgcacaaatctaattgtcgatcgtcgtggatagaaattaaactagaagctacgaaaacactaatcaaaatctaatccctgtggatacattatttttctatactatattccactagcgagcctaagttttatacaccggttttgcgcttatcacctgtggcctaggagtggccggagcaccgctggtggctgaaagtgcttaatgaatagggtgacccacatagcccttaccctgatgagctgcagctggggaactagtaccactatatgtgccagactctcaagacctcttggcctcctctcctctctctccctaatcaatataccctccaatctcctagcgatccccaccacctgctggtatgcgatgtccatatccaaatctcgggccatgctaaatctgatactgggcttgagccccttaataaatcgaagaactcgctcctgaactataataaccaaggctggtgcatgcctttccaaatcattgagctggacctcatactccgacacagtgatagaactctggagcaatgactcaaactctatgcgtcatgcatctatgagactatagggaacatacttcctcaagaacttatctcagaactgaatccaagtgagtgaagctgcctcggccggactacctaactcatatactcgccaccactgataggtcgctcctctaagctggaacatagtgaaagaaaccccactagactctgcaacacccatagtacggaggatacaacgacactcctcaagaaaaccctgggtatcctctgatgccaagccactgaaagtaggagggtggagggtgttacttcttgaaccactcgagcctaagttgctccccctcaaaaactgttgccctaacctcgggctgaactggaactaccagctgcatcggtatgacctcaggaacctggtcgacctagtcccgctactctggggtacggacaatgggagtctgtgctccatccccagcctgagatgtggaaggagcaagtggtatcaatccttcttgagccaaggtgctgaacatgctcaaaaactgggcgagagtctcctggaggactggtgcagtaataggcgtctcaggtgcctaccctccaattggagctacttgtggctcctctgtagcagcgagtgcgagcgctctggctgcaccacgtggatgtcctcatcctctaccccagccccaacctctcgtggctctatcagggggcacgagggatctggtcatttgatccagcagtacgtgtcctcaccatctgtgagagaataaaaagataaaaatttagaattcgaagtcaaaatctcgcactataaggaatcaaagaaatgaatcttttcctaacagttccatagcgtcctgaagataagtacagacgataccgtacagatccgtgagactctactaagcctgcttgtgactcataacacctatgaacctagtgctctgataccaacttatcatgaccccaatttacctccgtaggatgtcgtgattgcacctaatctctaagactaggtaagcctaacaatttgcggaataactgaatataaactaaactcaaccctcagcacatgagatataaataagaactgtgattcaaataattacaagtcccaaaacccggtagaaataaatcacaagctctaagagaaaatgttaagtgtctatatacatcagattctagtaaaataaagaaagcaacatattaaggatagagggggactccgaggtatacggacgctggcagatataccttgaagtctccacgtacggtgtagctcactggtatctggcttggtaggaagaacctggatctgtacaaaataatgtgcagaagtgtagtatgagtacaccacaggggtacctagtaactgccaagactaacctcggtagagtagtgataaggtcaggtcaggggcctactggaataaaaaggaaacaagacaggagatataacaatataatgaaatgacggggaatttaaacaatgagaagttatataaaagtaacaacataacgaatagaggtaaacgataggggcgctcccgaggtaccgtctcgagacccaaatgtaaatgcacaacaaggggagctcccgaggtaccacctcgtagtcccaagagtaaatatacaataggggcactcccgaggtaccaccccatagtcctaaaagtaaatacactacacataacatatggaacaacgagtttacagcaaggtctcatatagttaaagagtgaatacaagatcaaggaagcaggtaattcaactaagcatgttgcacaaattgaatgtaagagttaagacatgtaagcatgctacattaggctaaacatgatgactacacaggctggagtaacccagttaaggaattaaaagaaaactactcacaagaaccggattcttcaacatttaacctgagtactcactcgtcacctcgcgtacacggccttcacgtattgcaaatatcataacagcaccaaaacctaacggtagtttcacccacacaaggttagacaagttatttacctcaaatctcgctcaatcagtcgataagaatgcctttccctcgactttccgactccgaatgacccaaatctatccaaaagtaattacatactataaatacaactacaagaaacaaatttaaataataaatctacgacttagcaaagtatagaaaaatcgccctaaaacgtcgacccgatctcacgtctcggaatcaggtaaaagtcacaaaatacgaatacctattcgatatcgaatccaaccataccaaatttaccgaaatcagacaccaaatcgtcactctaatccccaaattaaactctctaaatccctagcctcaaactcctaaattccaccttaaatacacaaaaactaggtggggaaatcaatagggaaataaggttattgataaaaaaaaaatgagcacaagagacttacctcaaggtacctctcgaaagtcctcttaagaatcgccaaaacccgagctcaaaatgtttaaaatgaagcataatcgtgaacccttgtatttaagtgttctgccaccacttctgcttctgcggaaacttcactgcttccgcaacattgctgaagcgaccactcgcccgtatctgcggctttttccgctcttgcatcccctcactccgcttctgcgggctcgcttctacgagcctccaagctgcttctgtggtcccagctcccttacccaattctgcttctgcagtccccctaccgcatttgcggtcatgcaggtgcaaaaattccctagcacaagcggccacctacacaccccctccaaatctcgcacctgtgcattccagtccgcaccatcgggctccacctgcgatcaaagctccgcaggtgcagttacacctgcatagcccagtcttcaacaatttctcaacttcaaatcgatccgttaaccatcccaaatcaactcgaggcccccaggacctcaaccaaacataccaacaagtcctaaaacaccatatgaacttagtcaagcatttaaatcacatcaaacaacgctaaaaatacgaattgcatatcgattcaagcctaatgtactttagaacttcaaacttctacattcgatgccgaaacctatcaaatcaagtccgattgacctcaaatttttcacacacgttataattgccattacggacctactccaacttccggaatcgaaatccgaccccgatatcaaaaagttcattcccggtcaaactttccaaaaatcatccaattttccatgtttcaccaattgacgctaaaatgacctacggacctccaattcaacattcgaatacgctcctaagtccaaaatcacactaaggagatattggaaccgtcaaaactccattccagattcgtctttacactaatcaacctatagtcaattcctacgacttaaacttctattttaaggactatgtgtcccattttactccgaagccaaaaaattattctcccggtaagtcaaacaacccaaaaatgaaatagaaggagcaataaatagggatgcggggctaatactctcaaaatgaccggccgggtcaatacatcctccccctcttaaaataaacgttcatcctcgaacgagtataggggcatacctgaagaggggaaaagatgaggatatcgtctacgcatatcatgctcggactcccaagtcgcctcctcgataggatgacccctccactacaccttcactgatgcgatgttctttgacctcaactttcggacctgcatgtccaagatggtcacccactcctcaacataagatagatccttgtccaattagactgagctgaagtctaacacatgaaacgaatcgacgtgatacttccggagcatggaaacagggaatactggataaactacaacgagactaggtggttgtgcaagtcggtaagccacctctccaaccctctcaagaatctcaaaaggctcgatatatctagggctcaacttgcccttcctctcgaacttcaaaacacccttcatgggcgaaatccagagcaagacctgctccccaaccatgaatgcaatgtcgcgaaccttccaatccgtataactcttctacctggattaggctgtacgaagttgatcctgaatcaatttaaccttttccaaagcatcctaaaccaagtctgtacctaataacctagcctcgcccgactcaaaccaacccactggatattggcaccatctaccataaagagccttatacggtgccatttgaatgctcgactgataactgttgttgcagggaaactccacaagtggcaagaacagatcccaaacacccccccaaattctatcacgtaggtacgaagaatatcctccactatcttaatagtgcactccggttgtacgtccgtctgagggtgaaatgctatgctcaaatctacccgagtacccaactcatgatatacgactctccagaaatgcgatgtaaactgtgtaccccggtcagagatgatagatactggtacaccatgaagcctgacaatctcgcaaatataaacctgagccagctgctctgaagagtaagtagtaaacacatgaatgaaatgagctaacttggtcaatctatccacaatcatccaaactgcatcaaacttcctctgagtctatgggagcccaacaacgaaatccatagtgatccgctctcatttcccctctagaatatttaacttctgaagcaatccacccggtcgctgatgtttatacttcacctgctgaaaatttaggcaccgagctacatattgcactatgtccttcttcatccgtcttcagatttagtgttgcctcaggtcccgatacatcttcgtgtcacctggatgaatagagtaccatgaactgtgagcctcttggagaatcaactcacgtaatccatctacattaggcacacatagcctgccctgcatccgtaatacacagtcatatccaatggtgacctccttggcatcgccgtactgaaccatgtccttaaggacaagcacatgggggtcatcataccgacgctctctgatacgattataaagagaagagtgagaaatcacacaagccaaaactcgactcggctcgaaaatatccaatctgacaaaccggttggccaaggcctcaacatctaaggctaaaagcctctccgctactggtagatatgctaaactgcccaaactccccgccttacgactcaaggcatcggctaccatattggccttttcgggatgataaagaatggtgatgtcataatccttaagcacctccaaccatctctactaccgcaagttaagatccttctgtttaaacagatgttgtagactcctgtgatcaatgtagaccttacaagggacaccatactaataatgtcgccaggtcttcaaggcatgaacaatagctgctaattcgaggtcgtagacaaaatagttcttctcatgcacctttagttatctagacgcgtaggaaatcaccctaacctcctgcatcaacattgtgcctagaccaatacacgacgcatcacagtatactgtgtaggaccgcgatccagtaggcaacactaatactgggttgtagtcaaatcagtcttgagcgtttgaaagctctcctcacaatccttggtccacctgaacggagcacccttctggttcaatctagtcataagtgcagtaataaatgagaaaccctctacaaatcaacggtaataccccgccaagccaagaaaactccggatctccgtagctgaggacggtctaggtcaactctgcaccgcttcaatcttcttcagatctactttgatcccctcacttcaaaatttttgcatataacttctttttcctcaaagtctgaaacacggtcctcgggtgctgctcatgatcctcccgactccgggagtacaccagaatgtcatcaaaaaatacaatgatgaaagaatcaagatggggttgaaatgcactgttcatcaagtgcctgaacgctgctggggcattggtcaacccaaaagacatcacaagcaactcgtaatgaccatagagagtcctcaaagaagtattcaagatatcttgctcccaaatcttcaattgatgatagcctgaaggcaagtcgatcttagagaacactctgacaccctgaagctggtcaaattggtcataaatacatggcaatggatacttgttcttcattgtaaccttgttcaactggcgataatcaatacgcatttgcatagaaccatccttcttatttacaaacaagacaggagcaccccaaggcgacatactaggccgaatgaaacccttatcgagcaactcttgcaattgttcctttaatttattcaactctgctatggccatacaataaggtagaataaaaatgggttgagttcccggtaataaatcaataccaaagtcgatatccttgttgggtggcatgcccgaaagatctagcgggaaaacacctgaatagtccctcactaccggagctgactcgacggtaggagtatcaacagtaacatccctcacttattccagatatgcatcacaccctttctcaaccatttgccgagccttaagaaatgagacaacccttctacgaacatgatctaaggtacctctctactctagccatggtagacctgtcatagccaacgccactgtcttggcatgataatcaaggatagcgtgataggtcgacaactagtccatgcccaaaataacattgagatccaccatactgagcaataataaatcagctttggtctcaaaatcactaagaacaatcaaacacgaccgatacacacggtcaagaacaatgaaatcacacacgggtgtagacacatagacaggagaactcagagaatcacgggatacacccaaataaggggctaaatatgatgacacataggaataaatggatcatggatcaaataagactgatgcatctctatgacagaccagaacaatacatgtgatgacagaatcggatgcaaccacctccgtcatagaaggaagggcataatatttggcctggcctcccctctagggtgacctctacctgtccgacctccgcatctagttggatgtgcaagtgggatggtagctggtgttgtaaccatagcctgaacccggtggagcacgcggtgcctgagtgtctgtggaggtgtacccttcctgattttggggcaatccctcaccacatgacgagtgtcaccacactcaaaataagatctcgaaggacgtggctattgtgactggatcgggcgtgatcggttggactgaccgctgaaagcaccccatgcaagaggttcactagacaatggcaatgcataataaggagcctggggcctagaaacggtcggagcaccgcaggtggctggaagtgctgaaagaatagggcgacccacatagcccctaccctgacaagcagcagctgggggacgagtaccactatatgtgccagaatctcgagacctcttggccaccctctcctctctctccataatcaacataccctataatctcctggcgatccccaccacctgctggtatgcgatatcaatctccaactctaggccatgctaaatctgatattggggttgagcccctcaataaatcgacaaactcactcccaaactgtagcaaccaaggatggtgcatgcctgtccaaatcactgattcggaccgcacactccgacacggtcatagaaccttagcgtaactgctcaaactctgtgtgccatgtatctctgagactctagggaacatactccttctagaacatatctaagaattgagtccaagtgagtgaagctgcttcggccggactacccaactcatatgctcgtcaccactgataggtcgttcctctaagatggaacgtagtgaaagaaacccaactagactccaaaacacccatagtacagaggatacgatggaactcctcaagaaaaccctgggcatcctctggcgccaagacactgaaagtaggagggagttacttcttgtacctctcgagcctaaactgctccccctcagaaacggttgccctaacctcgggctgaactggaactaccggctgcattggtatgaccacaggaacctgggcgacctggacctgctgctctggggtatgggcggcgggagtctgtgctcctcccccggcctaagatgtggtaggagaaagtggtattaatcctgcatgagcgaaggtgctgaacatgctcagaaaactgggcgagagtctcctggagggctggtgcagtaacaaacgtctcgggtgtgtgtcctccaactgaactggagctactaatggctcctctgcatcagctcgtgcgattgctctggctgtaccacgtggacgtcctcggcctctaccctggccccagactctcgtggttctagcagggggcgcgaggtgtttggtcatttgatccagtggtacgtgtcgtcaccatctgtgagagaatagaaagccaaaaatttagaatctgaagtcaaaatgtcgcacgataaggaatcaaagaagtgaagctttttctaacagtttcaaagcctcccgaagataagtacagacgtctctgtactgatccgtcagactctactaagcctacttgtgactcataacaccaatgaatctagtgctctgatactaacttgtcacgaccctaatttccttccgtaggatatcatgatggcacctagtctctaagactaggtaagcctaataatttgcggaataaccgaatataaactgaactcaaccctcaacacatgaaatataaataaaaactgcgattcaaataattacaagtcgcaaaactcgatagaaataagtcacaagctctaaagagaaaatattaagtgtctctacacataatagtctagtaaaataaagaagcaacatattaaggatagagggggactctgaggtcagcggacgttggcagatataccttaaagtctccacgtacggcccaactcactgctatctggtctggtaggaagaacatggatctgcacaaataatgtgtaggctagggatttggagagttaaatttggggatttgagtggcgattcggtatcgtattttggtaaatttggtatggttggattcgatatcgaatgggtattcatattttgtgacgtctacccgattccgagacgtgggcccgggttaacattttggagcaattttttaattctttgctaagtcgtagatttattatttaaattagtttcttgtagttgtatttatagtatgtaattgcttttggctagatttgggtcgttcggagtcagaaagtcgagggaaagacattcttatcgactaattaagcgagatttaaggtaagtgacttgtctaaccttgtgtgggagaaactccccttaggttttggtactattatgatatttacaatacgtgaaggccgtgtacgcgaggtgacgagtgcgtactcggattaaatattgaagaatccggttcttgatgagtagttttcttttaattccttaactgagttactctagcatgtgtagtcatcatgtttagcctaatatagcatgcctacatgtcttaactcttacttgcaatttgtgcaacatgcttagttgaattacctgcttccttgatcttgtattcagtctttaactatatgagtccttgctgtaaactcgtcgttccatatgttatgtgtagtgtattttcttttaggactacgaggcggtacctcgggagtgcccctattgcatatttacttttgggactatgaggtggtacctcgagagctccccatgttgtgcatttatatttgggactacgagacggtatctcgggagcacccttgttgtttacctctattcgttgtgttgttacttttctgtaacttctcattgtttaaattcccgtctttttaatatattgttatatctcctgtcttgtttcctttttattccagtaggggcctgacctgacctcgtcacaactctaccgagattaggctccgtaggtgcggttacaccatcagagcctagtcttcagcaatctctcaacgttaaccatctgaaatcaacccgagacccccaggacctcaaccaagcataccaacaagtcctaaaacaccatacaaacttagtctagcctttaaatcatatcaaacaatgctaaaaatacaaattgcacttcgattgaagcctaataaactttagaactttaaatgtctacattcgacgctgaaacctatcaaatcaagtctgatttacctcaaattttgcacacaagtcataattgacattacggacctactctaacttccgaaatcaaaatccgaccccgatatcaaaaagtccactcccggtcaaactttccaaaaatcatccaattttccaactttagccaattggcgctaaaatgacctacggacctccaattcaacattcgaacccgctcctaagtccaaaatcaccctgcgaagctattggaactgtcgaaactctattccggagtcatcttcacacaaatcaacctacaatcaattcctactacttaaacttccattttaaggactatgtgtctcattttactccgaagccaaaaacaaattctcctggtaagtcacaaaatccaaaaatgaaatagaaggaataataaataggggctcggggcaaatactctcaaaacgatcggccgggtcgctacaaacggccgtgcatccaatcaagatatttcaaaaatctagagatcttataattggttctcattttagattgaatctgaaatataatgtttaaattccttcatttttagtcgatcatgtaagaatatcttgaataatattattttctttttactgtaaaatcgaatttcgctattttaattttgctagtccttgggaacagtgtagcaacagataattcaaaatcagaataggtccagtcgaggggacaaatcaatggaaaatgctatttgcttcgtaagaataagaattcacttctatgaaatggaagagtttcacggaaattgtctagattgttggatatcattgagaaagaaatagaaagaagtgttatcgaacgatttcctgcaattcttcccggtatgcaatgagtaaagaatcaagctacaagtctcgatcgatacgaaacgatttgatgaatcactgttaggtgttccaaaaatagtatggaatgagtaaagaatcaagctacaagtctcgatctatacgaaacaatttgatgaatcacttttaggtgttccaaaatatttttgcagtatttgtatgtaggttctgctttagttaaggaggacggcgttataaactattttactaacaatttgtagctattttcacccaagtgatgagactctcttttaatttaattaagcaggaataaccgcgctaaatacctgcttaattataaaagaacctcattcacttgacttctttaatcctggaacagtcagcaataaattgtatnnnnnnnnnnnnnnnnnnnnnnnnnnnnnnnnnnnnnnnnnnnnnnnnnnnnnnnnnnnnnnnnnnnnnnnnnnnnnnnnnnnnnnnnnnnnnnnnnnnnnnnnnnnnnnnnnnnnnnnnnnnnnnnnnnnnnnnnnnnnnnnnnnnnnnnnnnnnnnnnnnnnnnnnnnnnnnnnnnnnnnnnnnnnnnnnnnnnnnnnnnnnnnnnnnnnnnnnnnnnnnnnnnnnnnnnnnnnnnnnnnnnnnnnnnnnnnnnnnnnnnnnnnnnnnnnnnnnnnnnnnnnnnnnnnnnnnnnnnnnnnnnnnnnnnnnnnnnnnnnnnnnnnnnnnnnnnnnnnnnnnnnnnnnnnnnnnnnnnnnnnnnnnnnnnnnnnnnnnnnnnnnnnnnnnnnnnnnnnnnnnnnnnnnnnnnnnnnnnnnnnnnnnnnnnnnnnnnnnnnnnnnnnnnnnnnnnnnnnnnnnnnnnnnnnnnnnnnnnnnnnnnnnnnnnnnnnnnnnnnnnnnnnnnnnnnnnnnnnnnnnnnnnnnnnnnnnnnnnnnnnnnnnnnnnnnnnnnnnnnnnnnnnnnnnnnnnnnnnnnnnnnnnnnnnnnnnnnnnnnnnnnnnnnnnnnnnnnnnnnnnnnnnnnnnnnnnnnnnnnnnnnnnnnnnnnnnnnnnnnnnnnnnnnnnnnnnnnnnnnnnnnnnnnnnnnnnnnnnnnnnnnnnnnnnnnnnnnnnnnnnnnnnnnnnnnnnnnnnnnnnnnnnnnnnnnnnnnnnnnnnnnnnnnnnnnnnnnnnnnnnnnaaagtcatagatctcaatccaactccattggagcaaaaaaaatgcaacacatgctattacttttttttaagcgaccattttcagaatttttaaaatttacgtactctattataatattttaattattatcgagannnnnnnnnnnnnnnnnnnnnnnnnnnnnnnnnnnnnnnnnnnnnnnnnnnnnnnnnnnnnnnnnnnnnnnnnnnnnnnnnnnnnnnnnnnnnnnnnnnnnnnnnnnnnnnnnnnnnnnnnnnnnnnnnnnnnnnnnnnnaccatcctgacaacggtgtcagtccatgggtcatgagaaaacttaaagagcgagagaaaaaaaaaaaaaaaaaaaggatactacattggatatataaactaaatataatcatctattcacccaaatcagaggtccgtaagttacaagtttgtctggataatccagttaaatctttcacgagtgtcaaatggacgaattttcctgaatttaagcgggttaaaacggattaaattaacaaatcaataagttatgtatccgttctattagacgtttgttctaattttcttattatatttagtttttctatctttcgaatgaaagacaacctatttaccataattaattttacaatttacgtaaagaaaaatataattctttcatatttggcaagtttttttcttggaggaaaagatttttaacatctataaattgataatccttccttctcatttaatagcatccacaatgtagtccataaggggtattagagtcttatttatttgaagaaattttagacaagtattagtctgtctcttgtgtgtgcctcttagtggtttttttctcgatattttgtactctcttttatatagtgtattgcttatctccgcctgtggatgtaggtcaattggccgaacaacattaaatatttgtgtctcttttgctatatttttcttttgttatttaatttatcgtcgttcaaggtctgttttgttagcttcagcataaaacctggttatttttattttaaaacacttaaaggttaattgaacatatgtatgaatcaaaacagacaaaacaatagatcgtaagttataacttcaaatttgagtggatcatttttttatgggctaactttgacaccttaaatcttaatctctcgtgatcttcagttgaaaatctaaatatgaatcatttttgtgtcggtgacattaatttgcgagagatcttgcttttcactcatatcccaagttatggaatctcgtgaaatgcatcgaagtatgaccatattggcatatgtaaactgactcatataaaagtttaagcaattaaacatgaaatattgatgttatttaatttaaattggcaacatgaaacatgagtcagctattttaactgactcataatgttaaattaaacattatgttttaatttcctcaaataattagccaatcattcgatcaatttgttgagttttacgacccaaaaacccgcctcatgcatcaagatgacacctaatttctaagactagattagtcgattacttgaaaatgaaaaagattatagtataatacattactttatataatatatatataaaattaagttacaatctcccgagaagggtaaataagtttataatgtaatatagataggtcaaaattcctttaagctgttttcacatcaattaagcaaaacaataaatacaaggtatagtttattaaattattcctatataatgaaagtagttagatttttttttttaaataccatgcattcttattaatattaagggtataatctaaaacaattaacaagtttaattttgaattcctaaagtgatagtaattttttctnnnnnnnnnnnnnnnnnnnnnnnnnnnnnnnnnnnnnnnnnnnnnnnnnnnnnnnnnnnnnnnnnnnnnnnnnnnnnnnnnnnnnnnnnnnnnnnnnnnnnnnnnnnnnnnnnnnnnnnnnnnnnnnnnnnnnnnnnnnnnnnnnnnnnnnnnnnnnnnnnnnnnnnnnnnnnnnnnnnnnnacaatttttttaattttgagctaaaacgaaagtagttaagatgtcaacaaagtcttatggtggtctttacggcgtcccgcttttttttttcttaggttaactaattaatcttgtctgcactatttttcttccctttccgttatactttttcagtgacgtgtgcagtggtggttttcttttctccttcttctaatagcagttatagtaagaaattttatttaaagcattcatgagcaattgttgggacaaatttgataaagaaaacaagtagccatcttatcgtacttttaacaaatgaagaaagttaacactaaaaaaggaaaaattggcgtcttcatgttagatggagatggtgatgaaattgtggggactgggaagtatgcccatcgattaaaattttatttttttgttttcaggaactagcaagattggtcccagagtaaattcaatgaagaaaagaaaatttaaaaagaaaaaaatggccatttaagttgggaaaggccgattgatgcacaattgcacattcgtctagtatttttgtactcattctttattggaattctccaacaatcaatatagtgatatgaattattaaacaagtttttaaattcagaaaagctattggtacacccataatcttgttctttatcaaactatttgcaggtgaattaacactatcaacctgcaacactttaataatttaatttgttacctcaaccaaccgaaattagaatagagaatgctttctgacatttgatagctcatattgtcaccataagaatacaaacttgtttatcaaataaaacctttcctttatatacgtgcaaagattatattccagtgattttaaataaataatccgaaggttttggaaatgaacgtgatctcgtcatacatgatgtacgatattaatatagttgtttactcacttttcaagaaggaaatataatattcattacatataatagattatcaactcacattatttatttctcttcaaattttaccggaaaaatcggataacgttagatttgtgtatggttctaaaaatatgcgatacaattcgatgtaaatcgcgtagagaaatggaaatatgtgtattgttgactgtgaggatgaaaataataagcgaaaagaataaataagtaaaacaagcacaaggggataactatcaatataagaagtgatcttcttttttcggggtccatagcttacaaggattcctccttttatagaagagggtcattacaaaaaataataaaataaaacatatagtggatggcccatgatgacttgtctcttccttgattcctgccaagattctctctcttggtgcggttgcaacggctcatgtctgtgagctcgatactagctcgaactcgttacttggtcgggcccttcgatcttggatcgagttcggccttcgagatgggcgtcgcacatttccgacctcgaagcagtgccttgcggatcgattcggtcacgggctcgataggattatcgagccgcctcctnnnnnnnnnnnnnnnnnnnnnnnnnnnnnnnnnnnnnnnnnnnnnnnnnnnnnnnnnnnnnnnnnnnnnnnnnnnnnnnnnnnnnnnnnnnnnnnnnnnnnnnnnnnnnnnnnnnnnnnnnnnnnnnnnnnnnnnnnnnnnnnnnnnnnnnnnnnnnnnnnnnnnnnnnnnnnnnnnnnnnnnnnnnnnnnnnnnnnnnnnnnnnnnnnnnnnnnnnnnnttaacattcgaactcgatctaacgtaggaaggccgaaatctatttttaccgtatacagatagtcccctcgtttcttgaaaaaggatatggtgagaaacgatatgatttcccaacagctctgtcacgaccccaaatttcctccgtaggatgtcgtgatggcacctagtctctaagactaggtaagcctatcaatgcggannnnnnnnnnnnnnnnnnnnnnnnnnnnnnnnnnnnnnnnnnnnnnnnnnnnnnnnnnnnnnnnnnnnnnnnnnnnnnnnnnnnnnnnnnnnnnnnnnnnnnnnnnnnnnnnnnnnnnnnnnnnnnnnnnnnnnnnnnnnnnnnnnnnnnnnnnnnnnnnnnnnnnnnnnnnnnnnnnnnnnnnnnnnnnnnnnnnnnnnnnnnnnnnnnnnnnnnnnnnnnnnnnnnnnnnnnnnnnnnnnnnnnnnnnnnnnnnnnnnnnnnnnnnnnnnnnnnnnnnnnnnnnnnnnnnnnnnnnnnnnnnnnnnnnnnnnnnnnnnnnnnnnnnnnnnnnnnnnnnnnnnnnnnnnnnnnnnnnnnnnnnnnnnnnnnnnnnnnnnnnnnnnnnnnnnnnnnnnnnnnnnnnnnnnnnnnnnnnnnnnnnnnnnnnnnnnnnnnnnnnnnnnnnnnnnnnnnnnnnnnnnnnnnnnnnnnnnnnnnnnnnnnnnnnnnnnnnnnnnnnnnnnnnnnnnnnnnnnnnnnnnnnnnnnnnnnnnnnnnnnnnnnnnnnnnnnnnnnnnnnnnnnnnnnnnnnnnnnnnnnnnnnnnnnnnnnnnnnnnnnnnnnnnnnnnnnnnnnnnnnnnnnnnnnnnnnnnnnnnnnnnnnnnnnnnnnnnnnnnnnnnnnnnnnnnnnnnnnnnnnnnnnnnnnnnnnnnnnnnnnnnnnnnnnnnnnnnnnnnnnnnnnnnnnnnnnnnnnnnnnnnnnnnnnnnnnnnnnnnnnnnnnnnnnnnnnnnnnnnnnnnnnnnnnnnnnnntaaataattacaaataatatctcgtggaatcaaaacagaatttccttcaactttctgaaaatcacaacaattaatcgaaagcaactatggccataaatcaatatcaacaagggcactcacgaggtaccgcctcgtagtcccaaatcataaataaattcacaatatctcattttcttatatcaccgcgggagccttcataatttatttaaagaaaatatttttttccgaaatagcaccccgcgttttagccacccttatcacaccgcatgacttctagtagttcccctactagccacgcgtatcaagccacccttatctcaccgcatggtcattttaagcatttacactcctttcaactatttgaggtcttgcataacttcctacgaggtattatgacttgtgtaaattatcggttttggttttaaggtatttcggagttagcttggaagaatgaatttcatgttggaagcttaagttgaaatagtggatcgatatggacctatgtgtaaacgaattcggatttgaatttttatgatttcaatagatccgtattgaaattttggagccatagcaaaaagaatcgtcgaattcggacatcgtatgagagagttatgcccatttctgtatcggaggagatttcccgtcgccgcgagcgcccagggtagcgtggggcgctagccctggcgctgggaatttttgggtactggaaactgcgccacaggcagcgccccacgctacctgtgacgctcaaaaacaccagaggctctataaacgggttttttgaccatttttgacaaaaatagagttggggagctcggtttgggcgatattgggcgattttcatgggtaaacattggggtaagtgttccttatcctatattgattatatttcatatccatggtcatcattttatttcggatttatggaagaaatcaagatttttgcaaaatcttccaaaaatgtaaaatttaagatttggaggtcgagttgttatcggaattttggtaaaattggtatgggtggactcgtaattgaatgggttatcggattttgtagtttcgttggattccgagacatgggtcccacgggcgatttttgagttaaatttcggattttgttggaaaaatttgtattctcatatggaattaattcctacgattcgtgttgagtatattgaattaattgtgaatagatttggagcttttggagaccgagtccagagacgagggcatcccggagtaggattttacgctgtttaggtaagtaacagttttaactctggctttgagggtataaacctggagatttgacatcacgtgattgtttggaagtgatatccacgctaggtgacgagcgtgtaagtgtgcaccgcgagagattgagacttggtccgtcccgtgaggttgtgaggcctaatggctattatctatggttatgtgtttatttgttgttgaacttgtttgccttcatgttagagatcatgcttaggctttattcatgctcacattattggtactaagtcagagaaaatattgtacatgttacctcagtctctattatttgctaaaatgtggtggtacttgatgtgggttgtgttcccttatttgttggtgatgatgaggctagtgaggtacatgattgagtgaggccgagggcctggttgtgaggatattaatatcatagcgcatgagttgtccgcgtagcacgtgagttgaccgtgcgggtccaggtagtgataccatagcgcgtgagttgtccgcgtagcacgtgagttgaccgtgcggatccaggtattgatattgattgagtgaggcagagggcctggttgtgaggatattaatatcatagcgcgtgagttgtccgcgtagcacgtgagttgaccgtgcgggtccaggtagtgataccatagcgcgtgagttgtccgcgtagcacgtgagttgaccgtgcggatccaggtattgatattgattgagtgaggcagagggcctggttgtgaggatattaatatcatagcgcgtgagttgtccgcgtagcacgtgagttgaccgtgcgggtccaggtagtgataccatagcgcgtgagttgtccgcgtagcacgtgagttgaccgtgcggatccaggtattgatattgattgagtgaggcagagggcctggttgtgaggatattaataccatagcgcgtgagttgtccgcgtagcacgtgagttgaccgtgcgggtccaggtagtgataccatagcgcgtgatttgtccgcgtagcacgtgagttgaccgtgcggatccaggtattgatattgattgagtgaggcagaggacctggttgtgaggatattaataccatagcgcgtgagttgtccgcgtagcacgtgagttgacccaggtattgataccatagcgcgtgagttgtccgcgtagcacgtgagttgaccgtgcggatccaggtattgatatgatggcacgtgagttgtccgtgcttagcgcttgggctttgggagcccctccggagtctgtacacacccccagtgagcgcagagtgttgagtgttttgagtattgagtgctgagtgcgagtgatgagtgatggagtgacactgctgtgaggttgtatttatttgtgttgttgctgcatttatctgttaaacttctttgtggcatttactgagttatggaatttacctgtttattctgtttatttttaaattgtgaaaataaataattggactgttttacttagctcgtcactactgctcagttccttagttatttctgttactactgaggttgtactcatactacaccctgcactttatgtgcagatccaggtgagttagagcgcgacgattgttgatatctgtggagattgcaaggtagctgctagcgtccgcaggaccttgttactccttttatcatttcttcttttggattgtattgacagttagacagtttcatttcttagttcatagatttagacgctcatgacttagtgacaccccgatgtttggggctcgttttcgtatttctaaaatatattagagttgatttagtttatgagaaattcaaatgttgaaatgttttattaaattcttataatcgatttagtagaaatattttgggaagtaggcttgccttgtaacacgataggcgccatcacgaccatggttagattttgggtcgtgacaagttggtatcagagcctaggttacataggtctcacgagtcatgagcgggtttagtagagtcttgcggatcggtacggagacgtctgtacttatcttcgagaggctgcagaacctttaggaaaacttcacattcttgaattcttttcgtgcggtattgattcagcttgaagtgtaactctttgaattccttccacgcattcgtatgcgcacatggcgctcggtatcagttgtgcatcgacggcttgtgattccctggatgaggtgcgagatgtgatttctgtgtgttgatgttgggccagtctggaggactgaggccggggttttgactatagcttgagcactgaggtgttgattgtgtgagcgcgtgcttgtggtacttttggggatatttaagagagtattcagcggcttatgagccttagggcggtgtggttttatgcttgggtctcgtgtggtgagtctgggttgaggattgtggtgttatggcggggcaaagtatcaatttgaaggtaattcagaaggaactcggatagataggacatcttggtagtaggttggatcggcatggtaatgggtatgattagttctttgggtgtgtatgaggtaatgagttctacaggtgttttgtggcaatgtccttgggtttttggtggtctgcgtagcttggttgagttagaaggattcagtcctgacggattgatttgtgccattggggttcggagaagttcttgatggttttgagaacaactcttggcacgttcgaggacgaacgtatgtttaagtgggggagattgtaacgacccgaccggtcgttttaagcatttacactcctttcaactatttgaggtcttgcataacttcctacgaggtattatgacttgtgtaaattatcggttttggttttaaggtatttcggagttagcttggaagaatgaatttcatgttggaagcttaagttgaaatagtggatcggatatggacctatgtgtaaacgaattcggatttgaatttttatgatttcaatagatccgtattgaaattttggagccatagcaaaaagaatcgtcgaattcggacatcgtatgagagagttatgcccatttctgtatcggaggagatttcccgtcgccgcgagcgcccagggtagcgtggggcgctagccctggcgctgggaatttttgggtactggaaactgcgccacaggcagcgccccacgctacctgtgacgctcaaaaacaccagaggctctataaacgggttttttgaccatttttgacaaaaatagagttggggagctcggtttgggcgattttgggcgattttcatgggtaaacattggggtaagtgttccttatcctatattgattatatttcatgatccatactcatttatatcatgaatccgtgaatttatggaagcaaaatcagatttttgtaaaatcttccaaaaatgtaaaatgaagatttgaaggtcaatccgatatcggaatttgataaaattggtatgggtggacttgtaattgaatgggttatcggattttgtgagtttcgttggattccgagacatgggtcccacgggcgatttttgagttaaatttcggattttgttggaaaaatttgtattctcatatggaattaattcctacgattcgtgttgagtatattgaattaattgtgaatagatttggagcttttggagaccgagtccagagacgagggcatcccggagtaggattttacgctgtttaggtaagtaacagttttaactctggctttgagggtataaacctggagatttgacatcacgtgattgtttggaagtgatatccacgctaggtgacgagcgtgtaagtgtgcaccgtgagattgagacttggtccgtcccgtgaggttgtgaggcctaatggctattatctgtggttatgtgtttatttgttgttgaacttgtttgccttcatgttagagatcatgcttaggctttattcatgctcacattattggtactaagtcagagaaaatattgtacatgttacctcagtctctattatttgctaaaatgtggtggtacttgatgtgggttgtgttcccttatttgttggtgatgatgaggctagtgaggtacatgattgagtgaggccgagggcctggttgtgaggatattaatatcatagcgcgtgagttgtccgcgtagcacgtgagttgaccgtgcgggtccaggtagtgataccatagcgcgtgagttgtccgcgtagcacgtgagttgaccgtgcggatccaggtattgatattgattgagtgaggcagagggcctggttgtgaggatattaatatcatagcgcgtgagttgtccgcgtagcacgtgagttgaccgtgcgggtccaggtagtgataccatagcgcgtgatttgtccgcgtagcacgtgagttgaccgtgcggatccaggtattgatattgattgagtgaggcagagggcctggttgtgaggatattaataccatagcgcgtgagttgtccgcgtagcacgtgagttgaccgtgcgggtccaggtattgataccatagcgcgtgagttgtccgcgtagcacgtgagttgaccgtgcggatccaggtattgatatgatggcacgtgagttgtccgtgcttagcgcttgggctttgggagcccctccggagtctgtacacacccccagtgagcgcagagtgttgagtgttttgagtattgagtgctgagtgcgagtgatgagtgatggagtgacactgctgtgaggttgtatttatttgtgttgttgctgcatttatctgttaaacttctttgtggcatttactgagttatggaatttacctgtttatttctgtttatttttaaattgtgaaaataaataattggactgttttacttagctcgtcactactgctcagttccttagttatttctgttactactgagtggttgtactcatactacaccctgcactttatgtgcagatccaggtgagttagagcgcgatcgttgagttcaggctatctgtggagattgcaaggtagctgctagcgtccgcaggaccttgttactccttttatcatttcttcttttggattgtattgacagttagacagtttcatttcttagttcatagatttagacgctcatgacttagtgacaccccgatgtttggggctcgttttcgtatttctaaattatatttagagttgatttagtttatgagaaattcaaatgttgaaatgttttattaaattcttataatcgatttagtagaaatattttgggaagtaggcttgccttgtaacacgataggcgccatcacgaccatggttagattttgggtcgtgacaccacccttatctcaccgcagcgtttcaacacccagaccttataccaccgcatgcgtatcaatatcacaatatatcacaatttgcacctcaagtgctcaaataatttaacttgccaaaataattcaacaacaatatttttccacaataaagagctcacggctcatgccaaaataaatcatcaataataacaataaagagctcacggtccacaataatattcacaataaagagctcacggctccctcacaatgagtctaaaaatattcaggaataaataatttaggaaaataatatttcaaaatctttactacgttgcttcaatatcaagtttaaaaatgtcaaatacttcatattaataatatttaatttaaagaaaatcaaccttcaaataatgcacagaataaaagaaaccaagtttcaactaaacaggtaaaacaattagtaagaaaagatcaaacaaatttgaagtatatatctcagatcaatgatgaagaatataacaagataaaataatttaataaatgcgcaacagtgatctacacaatttaaaaatataatctttcgcaatttagcccgtgtacacactcgtcacctcgtgcacacgactttcaacatatttcaataatcacatcaataccaatcgtaggggaaatttcccccacacaaggttagacaagtcacttacctcgatttgctccaatttaaccaagtattatgcttttttctcgattttccgactccgatcgactcgtatctagtcataattaattcgatacggtcaacataaattatagtaatcactttcataagaaaatattacattttcattaaaattcgaaattagctcaaaatttgctcatgggcccgacatctcggaatccggcgaaacttataaaatccgacaacccattcaattacgagtccacccataccaattttaccaaaatccaataacaacagccgtgagctctttattgtggaaaaatattattgatgaattattttgacatgagccgtgagctctttattgtctattattgatgatttattttggcaaactattattgatgatttattttggcatgagccgtgagctctttattgtggaaaaatattgttgttgaattattttggcaagttaaattatttgagcacttgaggtgcaaattgtgatatattgtgatattgatacgcatgcggtggtataaggtctgggtgttgaaacgcatgcggtgagataagggtggcttgatacgcgtggctagtagggggaactactagaagtcatgcggtgtgataagggtggctaaaacgcgggatgctatttcgggaaaaaatattttctttaaataaattgtgaaggctcccgcggtgatataaggaaatgagatattgtgaatttatttatgatttgggactacgaggcggtacctcgggagtgcccttgttgatattgatttatggccgtagttgcctttgattattgttgtgattttcataaagttgaaggaaattctgttttgatttccacgagatattatttgcaattatttggtgtcattaaatgtgacatactatttgattcattttcaatgtcattttattttactacattgataaacattttaccatgccattattatattccagtagggcctcacctgacctcgtcactactctaccgaggttaggcttggcacttactgggtaccgctgtggtgtactcatactacgcttctgcacatctttttgtgcagatccaggtacattttaccagcctagacgtcagtgagttacctgcgcacggagacttcgaggtatatctgccagcgtccgcagactccggagtccccttctatcattttatgttgcttccttatattttatttagaccttgacatatagagacattgagaataaattcttagaagcttgtgacttatttctaccgggttttgggagttgaaattgtttgaattgtagtttatttatttcagatatttattattattccgcattgataggcttacctagtcttagagactaggtgccatcacgacatcctacggagggaatttggggtcgtgacaagttggtatcagagcactaggttcataggtgttatgagtcacaagcaggtttagtagagtcttgcggatcggtacggagacgtctgtacttatcttcgagaggctatggaactgttaggaaatattcacttctttgactccttatcgtgcggcattgatttagcttgaaacatatatcttatattcctttgtatccactcgtgtatgacattgcgcactcggtatcagttgtgcgtcgacggttcgtgatgccgcagatggactacgagggagccagagatgctcaaacattgcctcaacgtgtggttccgactgaagatgtgggcgtattgagagatcacctagtgaatcatgtgggggtgcaacggacgttggcgtctggttgatttatacaagctgtgaaggttattattgtggatcatcggacgttgtgacctatgacttcgcgccgagtgggggagtccactaccaatgggtggattgcggggtcatgtattatatcagttttggcctgaaatgtatatatgtggtactgaaaggttccctaaaatttacacatgtttaagacctgagattttgtagaggataaggttgggacttgcggtatgtccgcctccttaataatcctatacttcaataccaaaggagttatagaaacaactctaaatttgtagaaggtctactcagcgtggacgtcactgttgcggattttggggtgcttcggagtaagtacagttgttgacgagattctggactatgtggttcgtgccaagatttgtctgtatggagctctacttttgtgatcgttgtgtataaataggggtaagggttaccccaaagaagaatcaaagagtatgttaagaaatgggtcagctcaacagtgttgagtcagcataacaaaagaagaaatttgccttgggagagataattctccaccagtgttcgtggtaagcctatgaagagggcagaccagccaatgcaacaccgcccacttggctcaggcagtcgtccagcccagtctgcacatcggattactcggggtgctccagtaagttcttttaatgcaccaccgacatgagttcctacaatggttattccagttatctggcacagactcaatatgagcagcctaacccgcaaaagggttgttatgaatacggtgatactaggcacatcatgagaaaaattcccaaacttgggagagacttatttcatcaaagcactcaggctacgtgccccattgcagttactacaccacccacacgaccagttaggggtggaggacagacgggtaaaaggcgtcctagaggtggagacccagccgttgatatatttgttttacggtatggcggaggtcgctacatcagatggtgtcgttacaggtacgacctcgatttaatataaaggaataatttccttaagttgattcggttctcaatatcgaaacgagtcttcctattgtgctccacttatgagtgagcttcataattctataatctacttatgtgtttacccctgttgggagattttatggagataactacgcctatcatttcgtgttggtcactaataagagctgcgaggctaaatgtggctttctgttactcatttcggtaaattttgatgtaaattccgaataattaattgcaaattgtgaattatatgccctaccggtgtggggttcattatgtgttgtgatttggtgtaaccgaaattatttaaaaggagaaaatggaaattttcaattggcacgatgtgcatattacttgtgattcagaactgaggacgagatcctcacatttttatataaattgatatgtttaaaccgggctacgagctgcggtggaagttatataaggacgagatccttgtgaggaaaattcttgtgtttaagttctcccttgtgaaattaaatttgtactatagtactaatagggagtcatgcctgttaggcttatttgaaaattcttatatgaaattctctgtgcatagttgtcaaattcgtgttgtaattattaatttttaacctacgaggtaggtgcccgcctaggtggcgttaaatgtgactcgttaattcgggtaaataattatgaagtcttcatgcctcgcatctagttatcagtattgtgaaggtttgcaacgagatttttgttaacatgaggttaaatgacgattctgtaattgattatgaacaactattaagaccaaattgatccaagagggtgccccatttacagggtcagacgagtgtgagttaagctttcagaagctcaagatcactttgactccgacacaagcgttggtattacttacatattcaaggtcttatactgtgtattgtgacgcgtcgcgtattggtctcggcgcgatgttgatgcaagacggtagggtgattgcctacgcgtccagacagttaaaggtacatgagaagaattatcggtccatgaccttgagttagcagctattgttcatgccttgaaaatttggcggcattatttgtacggtgtccattgtgaggtctacaccgatcaccgaagtctacaacatctgtttaaacagaaggatcttaatttgcggcagagatggttggagttgcttaaggattatgatatcaccattctctatcatcctgggaaggccaatgtagtggccgatgccttgagtcgtaaggcggagagtttgggcagcttagcatatttaccggtagcagagaggcctttggccttggatgttcaggccttggccaaccagtttgtcagattggatgtttcgagccgagtcgagttttggcttgtgtggtttctcagtcttctctttatgatcgtatcagggaacgtcagtatgatgacccccatctgcttgtccttaaggatacagttcagcacggtgatgccaaggaagtcactattggagatgaagatgtattacggatgcagggcaggctatgtgtgcctaatgtagatggttttcgtgaattgattctccaggaggctcacagtttgcggtactccatacatccgggtgctgcgaagatgtagcaagacttgagacaacactattggtggaggcggatgaagaaagacatagtggaatatgtagctcggtgcctaaattgtcacaggtgaaatatgagcatcaacgaccgggtggattgcttcagaagttggaaattccagaatggaaatgggagcggatcactatggatttcgttgttgggctcccacggactcggaggaagttcgatgcagtttgggtgattgtggatagattgaccaagtcagctcatttcattcctgtgattactacttactcttcagagcagctggctcaggtatatattcgcgagattgtcagacttcacggtgtaccggtatctatcatctctgaccggggtacacagtttacctcacggttttggagggcagtacatgagagttgggtactcggtagagttgagtacaacatttcaccctcagacggacgggcagtccgaacgcactattcagatactggaggatatgcttcgtgcgtgtgtgatagattttgggggtgcttgggatcagttcttaccacttgcggagtttgcttacaacaacagttaccagtcaagcattcagatggctccgtatgaggccttgtatggtaggcggtgccggtctccagtgggttggttcgaaccgggcgaggctagactattgggtacagacttggttcaggatgccttggaaaaggttaagttgattcaggatcgacttcgtacagcccaatctagacagaagagttatgcggatcggaaggttcgtgatgttgcattcatggttggtgagcgggtattgctccgggtttcgcctatgaagggtgtgatgaggttcgggaagaagggcaagttgagccctaggtatattgggccttttgagattcttgagagagttggagaggtggcttacagacttgcactaccacctagtctctctgcggttcatccggtattccatgtttctatgcttcggaaatatcacggcgatccgtctcatgtgttagacttcagttcggttcagttggacaaggatctatcttatgttgaggaaccagtggctattttagataggcaggttcgaaagctgaggtcaaagaacattgcttccgtgaaggttcagtggaggggtcatccggtcgaggaggcgacttgggagaccgagcatgatatgcagctgttatccacacttattcaccagctcaggtactttttctaactccgttcgaggacgaacgtttgttttagaggtggagaatgtgatgacccaaaatgtcatctttaaatttaataattaattatgtgatctaagcactatttatcattactcgacttgcgtgtgcagtccgtaaaattttcggaaaagttttcaggtgaaaaatggattaaaatgtgaattagagctttaaaactcaactgagttgactttggtcaacattttgagcaaacggactcggatcagtgttttgacagtttggtaggtccgtatcgtgatttgggacttaggcgtatgcccggaatcaaattccgaggtccctagcccgagatatggaattttgatgaaaaattaaaagtttaagttcaaatagtgaccggatgtcaaattatgtgcaaacgaccccggaatagaattttgatgattccaacagctccgtatggtgattttggacttaggagcgtgatcggaattttatttggaagtccgtagtggaattaggcttgaaatgccgaaagttgaatttttgggaagtttgaccgaggggttgactttttgatatcggggtcgaaatccgattctgaaaatttttataaatccattatgtcatttatgacttgtgtgcaaaatttgaggtcaatcggaattgatttgatatgtttcggcgcaaaatatagaagttggaagatttgaaaactcataattcgattcgatgcgcgattcgtaatttcggcgttgtttggcatggtttgaagcctcaactaagttcatattgtattttgggacatgttggtatatttggttaaggtaccgagggcctcgggtggatttcggaaggttaacggaatgaatttcggacaaaaaggagctgctggaatttttctgctgcagaagctgtttttggacagcaaccggtgcaatcgcagagctgactttggaagcttatatctcgaaatctataaggaatctgaacattttcaaaacatgaaagttgtagccctttgattctagtttccagaatgataaaccatttatcattcagacatttatacaaaatgttatgatcgattgactgaagctgtactgcagatttttgctacagcagtgtgcatcgccagaaaaccccaaaaacactatcccggtcgctaaaagtccaatcccgtcactaaaagtgtcacatctggtcgctaaaggtgcacaccaggactatttataccaacagttttatttcactaaaaatgctctaactccatcatacgaactcggaattcgacgattcttgttcctattagtcacaaataaaactacgaacccattcgttcaatcgaaactcaatttggagctcatttgctcaatgtgataccaattttgctcgttaaacaattaactcatatttcgcgcttaaaactcaatcgcgacttgatgaaattagaccaaacttttcagatcactcctataattcattatcaaaatgtcaaaagtctcgaaatcgaatttcgatctctagaactaaaaatgaacttttggatcattacatgcttatgttgaaaacatcaaactcttcctcgacagcctgtagtgtatcaatcataacttcttgtactcaactccaacttccaaacggtttaaagttctgcaaactagatacaatgtactacaactttcatgtttttctcatctcccaacttcttatagattgcgagatataagctcccaaagtcagccctgtgcagcagaatgataaatggtttatcattctggaaactagaatcaaagggctacaacttttatgtttcgaaaatgttcagattccttatagatttcgagatataagcttccaaagtcagctctgcgattgcaccggttgctgtccaaaaatagcttctgcagcagaaaaattccagcagctcctttttgtccgaaattcattccgttaaccttccgaaatccacccgaggccctcggaccttaaccaaatataccaacatgtcccaaaatacaatatgaacttagttgaggcttcaaaccatgccaaacaacgccgaaattacgaatcgcgcatcgaatcgaattatgagttttcaaatcttccaacttctatattttgcgccgaaacatatcaaatcaattccgattgacctcaaattttgcacacaagtcataaatgacataatggatttatgaaaattttcagaatcggatttcgaccccgatatcaaaaagtcaacccctcggtcaaacttcccaaaaattcaactttcggcatttcaagcctaattctactacggacttccaaataaaattccgatcacgctcctaagtccaaaatcaccatacggagctgttggaatcatcaaaattctattccggggtcgtttgcacataatttgacatccggtcactatttgaacttaaacttttaatttttcatcaaaattccatatctcgggctagggacctcggaatttgattccgggcatacacctaagtcccaaatcatgatacagacctaccaaaattttcaaaacactgatctaagtttgtttgctcaaactgttgaccaaagtcaactcagttgagttttaaagctctaattcacattttaattcatttttcacctgaaaactttnnnnnnnnnnnnnnnnnnnnnnnnaaatagttcttagatcacataattaatcattaaatttaaagatgacattttgggtcatcacaagctcgatcagatatacactaatatttttatcgatcccgaccatgacgtatgtaatgctcgatcatcttatgcgtctttatagtccccgactttatcgaggatacccgaattttttcttcccttttgggaattgccagttaccttcggtgcttggtgaccggagaagatcaatcagtgatgaatacggtagggcccgcctgtcttttcaacgaggcccaacatgctttgaatcgggtaacttctgatggcgttttcgctgcttcttttacacagagttttaggtaattctaatgtttctccttttgtttgcaggcttcgatgttacatcacgaggcttttctccgaattagggaggagcatgaggagatggctgaacaagtattctgaatattccatgatagtgaagatgaaaaagagataactactaacgatccgattctgtaggttcggcagaggatcgagcaggtcggacggtttaattcacaggtagatgtgctgctggccgaggcagaagaatttaaaaggtgtatggataaccttgcctcgaaaaaaggaagccatcgaagctcagttggagctgtccgatgcccaattttgatctgcgaaagaaaatgctttggggttgatcgaaaagatgaaagagcttcagcatcggttggatttggccactttagataaagcagattttgccaaagaactcgaagtggccagatctgaagtggtcgaggccaacagatgagccgatgccaaagtggctcagttcaggatcgatgtcgaagttaatcaagccaaatcagtgggcatggtcgaacatgcaaagtggcaggcttggagagaggctctcgaaggggtcaaagctcagggcttcgatattggggccgagattgaagtcgcctaggggggaggagaacagagctcggaggttggcctttcctgaggaggactctgatgactcgggggagtctgaagacgaggacgatgccgagaatacggcctccgatgaagattaggtcatttagggccttaggtcgatcgctgcgttcttgtgatactgcttacgatttttgtataaagaacttcctttcggaagagtagccgcctctgtacaaaaaaattgtaaatacaaatctttcttctttttaaagagaaatggcctttcaaactaaatagatagtttgaatttaattctctgttgccttcgggcctcgtgggtagtcccctttgctttatcgggctcgagcgtccttcagcttaaatagtcaagtgtttgttttaattcgaagaaatgagtagttttgctcgaaataatgtagcccataggcgtaatagtcgagcgagtgattgctcgaactcgaaataaaggtagcccgtaggcttagcagtcgagtgaataattcaaactcgatgcagtgtagcctgtaggcataatagtcaagtagcccgtaggcttaatggtcgagtgagtgattgctcgaactcgaaataaaggtagaccgtaggcttggcagtcgagcgaatgattcaaactcgatgcaatgtagcccgtaggcttaatggttgagtgactgattgctcgaactcgaaataaaggtagcatgtaggcttggcagtcgagcgaatgatttgaactcgatgcaatgtagtccgtaggcgtaatagtcaaagtagcccgtaggcttaatggtcgagtgagtgattgcttgaactcgaaataaagatagcccgtaggcttggcagtcgagcaaatgattcgagctcgatgtgatgtagccggtaggcgtaatagtcaaagtagcccgtaggcttaatggtcgagtgagtgattgctcgaactcgaaataaatgtagctcgtaggcttgacagtcaagcaaatgatttgatctcgatgcgatgtagcccgtaggcataatagttaaagtagctcgtaggcttaatggtcgagtgagtgaatgctcgaactcgaaataaaggtagcccgtaggcttggcagtcgaacgaatgattcgaaatcgatgcaatgtagcccgtaggcgtaatagtcgaagtagcccgtaggcttaatggtcgagtgagtgattgctcgaactcgaaataaaggtagcccgtaggcttggcagtcgagcgaatgattcgaactcgatgcaatatagcccgtaggcgtaatagtcaaagtagcccgtaggcttaatggtcgagcgaatgattcgaactcgatgcaatgtagcccgtaggtgtaatagtcgaagtagcccgtaggcttaatggtcaagtgagtgattgctcaaactcgaaataaaggtagcccgtaggcttggcagttgagcgaatgattcgaactcgatacaatgtagcctgtaggcataatagtcaaagtagcccgtagatttggcagtcgagcgaatgattcgaactcgatgcaatgtagcccgtaggcgtaatagtcaaagtagcccgtaggcttaatggtcgagtgagtgattgcttgaactcgaaataaaggtagcccgtaggcttggcagtcgagcgaatgattcaaactcgatcatgtttgcataataaatcttgaacatagaatatcggtaaagaagagagctttctttgcaagtcattatacatgggttcatgttttgcgtcaaggctcgggtcaactatataagcatggttcgttttgaccatttggcccttacgacgtttcgcgttgagacactgtttgtcatgaaataacgaagtaacttcctttgcaccgaacttgataatcatcacagatgcgttcaatgataaagccccctgtacgaggttgattttaaagaggcctcggatactcagcagtagtatcgtttccgctatatggctggtatcgatctctggtcgacttttgctttttcgtaacggacctagaaatcaactggtcatcttcgactcttattttggattgatatcgattgtgcacatcggtccaagtaatagctgggtactcgatcagattttgcttcagccgccgtgaagccatcgagctccgctcgtttagaccttgagtgaaagcttgaacagcccaatcgtctgtgactggtggcagatccattcgttccatttgaaaacgagctacgaactcccttagcatctcgttatccttttgtattaccttgaacagtccgactttctggtttcgacctttatggctccggcatgtgcttttacgaagcaatctgcaagcatagcaaaagaatcaatagagttagatggtaaattatgataccatattgcccctttgacagggtttcaccgaattccttgatggcacacgtgtaagaagtgacgtgctcgttggggtcggtcgttccgttatatttgggtatttcgggcatacggaattttttggggattggttttggggctgcactcgagggaaaaggcttttgaatgaattttttcgaatctagcccttttatcattggtggagctcccgggatctgatcgaccctggaattatatgtttctacttttttatcgttggcttcgactcgttttgtgagttcctcgagcaatttagtaatttcgggagtagtccccgattcttgctcatttgacttcactatggctggttccgttctgtgggtgatttctcgaagcggattgggctccggcctgctttgtacctgagtttggctctgcaactgagctatcgctatttgctgggcttgtaacatctcgaagatcatccgtaagctgactccgatctcctccacgttatgggtgtctcgagctacggatcgagtaccgccctgaatgcttctttccggttcggaacgctgattcgcctctagagctatttgtgaattgacatccaatggtacttcggctcgaatttcgggtgcttcgattcgagcctcagtgccttcatcgagtggccttccggccccgggtgccaagttgttggtttcatcttgaaggccggcttcgtggtcgataggtaagccattgctgatttgaagttgtaaactggtgtgtactttagatttatatcaaacaatcactgttacccttagccccacggtgggcgccaaactgtttacccgaaaaatcggataacgttagatttgtgtatggttctaaggatatgcgatacaatttgatataaatcgtgtagagaaatagaaatatgtgtattcttgactatgagaatgaaaatagtgagcaaaaagaataagataaagtaaaacaagcacaaggggatatctttcaatatgagaagtgatcttttgttacccccttgcttacaatccatccctctttatagtagagggatcctactttatatacaataaaaaatacgtagtggagagcccatgatgtattgtcttttcctcgatttccgccaagattctctcccatagtgcggttgcaacggcccttgtctgcgagctcgatactggctcgagctcggtattggatcgagccctcggccttggtccgagctcgattctgacttggggtctcgatattcggggtgagtgttggtcggtccatgcatcttcgataatctccgctttgcctcgtagttcgatttggatatgagctcgataatgatatcgagcttgtcattgatcggtcttagagctcgaagctcgccgcccttacttcggacctcgaccgagcttgtcatgcagatatcctttgatcgaaacattatcgtctcgaccagtccgtacgactgactcaaatcggttttgaccgtacacagatagtcccctcgtttctcggaaaaggatgtggcgagaaacgatatgatttcccaacagctcgatcagatatatactgacgttttcatcgatcccgaccatgacgtatgtgatagctgtcccatcggttcggttttaccaaggcatttaatgtgtcagacggtggtcggccacctctgatattgaaccgtcattgcttcaatctataaatagcctttccttccaccattcatcacttttacgtcttcaatcttccaaattttcaagttccttttcgttttctgagttttctgcctgtaaatctgtgagttttactgcaaactcttccttaaacaccaaatacttccgttctttgttcacgaaattttaaatggcaaaaacgtctaaaactgttccgcaaaaagagaccgcttcttcatctcgacctgctggtggcgaggatgtggaagagccccgccctgaggaattcgttccggtagggtgttcgactgtaggcgattttaaaattgaaaagccttctccgataccgggtcggtgtgagccgatgtcgaggtaccaatgttcaattaccgaaaaagttctcgataaagtcatacaagaatgcaactgggataataaactcgtagtaatcccatcgcccgatgaatcaattactacccacgtcgaagggttcttaagtgtttatacttatcctttcacgttgggacccttagaccctgtcatcgttgccttttgtaagaggtacgatgtgaccctcggccaaatccacccttccttttggaggatagtgattcttcttcgatttttctcgagcaaggtcgaggggcgtatcttcaccctcgatcatcttatgcgcctttacagtccccgactttatcgaggagggttgatcaagcttgctcgccgagcaaccaaagcgccattctcgagcatagacgagacccgggatcggggttggatgggccgttttgttcgaatcaaaacctcggacctgatccctgccgatgacttgccatttcccgagaaatggaatatgagccgtgagtaaacgtttctctttgcccgttttgattttgtgattgcctttctattttgttgatccatttttctttccttatcacagccgtagctcgaatgccggaaccgatcccggatcttagacaatgggtcgaaagcctggtgttgcagagaccgtactccgagcgtgcttgggtcgaattatcaaagggtcgatgggaggcccgcagtcatggtaaatctttttgtcgatttgtctcttcatcggtttgtatggtaaatctccctcttcccttttgtaggactcgggaaagatgtagtcatgaggccccatctggtggcgaagaagttcctgtcctgaagcaggtaaaagaaaggaagagaaaagacgtatcgggctccccgagctcggaaaagaagaaaccggctaagagatctcgaaagccgaaggggggctctggtgttatgtcttcggaagtggtccgccatttaagggacgagcccgaagaaggagaggagaatttagcctgcgtacgggctaatgttgtgattcaacagtcttccaatttggtggaagcaaatcagggaaccttggccataatcccagaacaagaagaagccgagattatcccttctcgagctaagatgattgaaagggataccgagggtggatcttctcgggcagtagaagatatttcaagggatgagttcgggatagttgacattggcggatcccctcagatttcggatgccatgattcgagaggccgtcatgttggaggatcggtcctatgagggtattcaggagtcggccgatatccatggttttctggaggggctcgagtcaggtgcctcggaggaggttaccggttttggtggaatgccggtacccaaaaaagcatcgtggtcgggttctaccgagccttcatcgattcataaactggtggaccgatttccggccccgagtatcgatcccgaccgaaggcggaagatagtgctctccgtacctgcggatacccgaattttttcttcccctgtggggattgccagttaccttcggtccttggtgaccgaagaagatcaatcagtgatgaatgcggtggggcccgcctgtctcttcaacgaggcccaacatgctttgaatcgggtaactctgatggcgtttttgccgcttcttttacacagagttgtaggtaattctaatgtttctccttttgtttgcaggcttcggtgttgcatcacgaggcctttcttcgaatccgggaggagcatgatgccgaggttcggagcctcactgagaagagtgactcgtacaagctccttagtgaaaaacttcgagcagatttgacagcggctcgggaagagcatgaggagatggctgagcaggtattccgaatgttccatgatagtgaagatgaaaaagagataaccactaacgatccgattctgcaggttcggcagaggatcgagcagattggacggcttaactcacaggtagatgcgctactggccgaggcagaagaatttaaaaagtgtatggatatccttgcctcgaaaaaggaagccgtcgaagctcagttggagctgtctgatgcccaacttcgatctgcgaaagaaaatgctttggggctgatcgaaaagatgaaagagcttcagcatcggttggatttggccactttagataaagcagatttggccaaagaacttgaagtggccagatctgaagtgatcgaggccaataaaagagccgatgccaaagtggctcagttcaggatcgatgtcgaggttaaccaagccaaagctgagagcatggtcgaacatgcaaagtgcaagctcggagagaggctctcgaggaggtcagagctcagggcttcgatgttggggccgagattgaagtcgccagggcggaggagaacaaagctcggaggttggcctttcctgaggaggactccgatgactcgggggagtctgaagatgaggacgatgccgagaatacggcctccgatgaagattgagtcatttagggccttaggtcgatcgctgcgttcttttgataccgctttcggtttttgtataaagaacttccttttggagagtagccgcctctgtacaaaaaatttgtaaatataaatctttcttctttttgaagaaaatagcctttcaaactaaatagatagtttgaatttaaatctctgttgccttcgggccttgtgggtagttttgctcgaaatcggtcccgtaggcttagtagtcgagtgaatgattcgaactcgatgcaatgtagcccgtaggcgtaatggtcgagtgagtgcttgctcgaactcgaaataaaagtagcccgtaggcttagtagtcgagtgaatgattcaaactcgaaataatgtagcccgtaggtaataaagtagcccgtaggcttaatggtcgagtgagtgcttgctcgaactcgaaataaaagtagcccgtaggcttagcagtcgagtgaatgattcgaactcgatgcaatgtagcccgtaggcataataggtcgagtgagtgcttgctcgaactcgaaataaaagtagcccgtaggcttagtagtcgagtgaatgattcgaactcgaaataatgtagcccgtaggcataatggtcgagtgagtgcttgctcgaactcgaaataaaagtagcccgtaggcttagtagtcgagtgaatgattcgaactcgaaatgtagcccgtaggctaatgtcgagtgagtgcttgctcgaactcgaaataaaagtagcccgtaggcttagcagtcgagtgaatgattcgaactcgatgcaatgtagcccgtaggcgtaatgtcgagtgagtgcttgctcgaactcgaaataaaagtagcccgtaggcttagtagtcgatgaatgattcgaactcgatccatcagatcctgtttgcataataaatcttgaacatagaatatcggtaaagaagagggctttctttgcaagtcattatacatgtgttcatgttttgcgtcagggctcgggccaactacataagcatggttcgttttgaccatttggctcttacaacgtttcctgttgagacactgtttgtcatgaaataacgaagtaacttcctttgcaccgaacttgataatcatcacagatgcgttcaatgataaagccccccagtatacgaggttgattttaaagaggcctcagatactcagcagtagtatcgtttccgctatatggctggtatcgatctcttattgacttttgctttttcgtaatgaacctagaagtcaactggtcatcttcgactcttattttggattgatatcgattgtgcacatcggtccaagtaatagctgggtactcaatcatattttgcttcagccgccgtgaagccctcgagctccgctcatttagaccttgagtgaaagcttgaacaacccaatcgtctgtgactggtggcagatccattcgttccatttgaaaacgagctacgaactcccttagcatctcgttatccttttgtattaccttgaacagtccgactttctggtttcgacctttatggctccggcatgtgcttttacgaagcaatctgcaagcatagcaaaagaatcaatagagttagatggtaaattatgataccatattgcccctttgacagggtttcaccgaattccttgatggcacacgtgtaagaagtgacgtgctcgttggggtcggtcgttccgttatatttgggtatttcgggcatacggaattttttggggattggttttggggctgcactcgagggaaaaggcttttgaatgaattttttcgaatctagcccttttatcattggtggagctcccgggatctgatcgaccctggaattatatgtttctacttttttatcgttggcttcgactcgttttgtgagttcctcgagcaatttagtaatttcgggagtagtccccgattcttgctcatttgacttcactatggctggttccgttctgtgggtgatttctcgaagcggattgggctccggcctgctttgtacctgagtttggctctgcaactgagctatcgctatttgctgggcttgtaacatctcgaagatcatccgtaagctgactccgatctcctccacgttatgggtgtctcgagctacggatcgagtaccgccctgaatgcttctttccggttcggaacgctgattcgcctctagagctatttgtgaattgacatccaatggtacttcggctcgaatttcgggtgcttcgattcgagcctcagtgccttcatcgagtggccttccggccccgggtgccaagttgttggtttcatcttgaaggccggcttcgtggtcgataggtaagccattgctgatttgaagttgtaaactggtgtgtactttagatttatatcaaacaatcactgttacccttagccccacggtgggcgccaaactgtttacccgaaaaatcggataacgttagatttgtgtatggttctaaggatatgcgatacaatttgatataaatcgtgtagagaaatagaaatatgtgtattcttgactatgagaatgaaaatagtgagcaaaaagaataagataaagtaaaacaagcacaaggggatatctttcaatatgagaagtgatcttttgttacccccttgcttacaatccatccctctttatagtagagggatcctactttatatacaataaaaaatacgtagtggagagcccatgatgtattgtcttttcctcgatttccgccaagattctctcccatagtgcggttgcaacggcccttgtctgcgagctcgatactggctcgagctcggtattggatcgagccctcggccttggtccgagctcgattctgacttggggtctcgatattcggggtgagtgttggtcggtccatgcatcttcgataatctccgctttgcctcgtagttcgatttggatatgagctcgataatgatatcgagcttgtcattgatcggtcttagagctcgaagctcgccgcccttacttcggacctcgaccgagcttgtcatgcagatatcctttgatcgaaacattatcgtctcgaccagtccgtacgactgactcaaatcggttttgaccgtacacagatagtcccctcgtttctcggaaaaggatgtggcgagaaacgatatgatttcccaacagctcgatcagatatatactgacgttttcatcgatcccgaccatgacgtatgtgatagctgtcccatcggttcggttttaccaaggcatttaatgtgtcagacggtggtcggccacctctgatattgaaccgtcattgcttcaatctataaatagcctttccttccaccattcatcacttttacgtcttcaatcttccaaattttcaagttccttttcgttttctgagttttctgcctgtaaatctgtgagttttactgcaaactcttccttaaacaccaaatacttccgttctttgttcacgaaattttaaatggcaaaaacgtctaaaactgttccgcaaaaagagaccgcttcttcatctcgacctgctggtggcgaggatgtggaagagccccgccctgaggaattcgttccggtagggtgttcgactgtaggcgattttaaaattgaaaagccttctccgataccgggtcggtgtgagccgatgtcgaggtaccaatgttcaattaccgaaaaagttctcgataaagtcatacaagaatgcaactgggataataaactcgtagtaatcccatcgcccgatgaatcaattactacccacgtcgaagggttcttaagtgtttatacttatcctttcacgttgggacccttagaccctgtcatcgttgccttttgtaagaggtacgatgtgaccctcggccaaatccacccttccttttggaggatagtgattcttcttcgatttttctcgagcaaggtcgaggggcgtatcttcaccctcgatcatcttatgcgcctttacagtccccgactttatcgaggagggttgatcaagcttgctcgccgagcaaccaaagcgccattctcgagcatagacgagacccgggatcggggttggatgggccgttttgttcgaatcaaaacctcggacctgatccctgccgatgacttgccatttcccgagaaatggaatatgagccgtgagtaaacgtttctctttgcccgttttgattttgtgattgcctttctattttgttgatccatttttctttccttatcacagccgtagctcgaatgccggaaccgatcccggatcttagacaatgggtcgaaagcctggtgttgcagagaccgtactccgagcgtgcttgggtcgaattatcaaagggtcgatgggaggcccgcagtcatggtaaatctttttgtcgatttgtctcttcatcggtttgtatggtaaatctccctcttcccttttgtaggactcgggaaagatgtagtcatgaggccccatctggtggcgaagaagttcctgtcctgaagcaggtaaaagaaaggaagagaaaagacgtatcgggctccccgagctcggaaaagaagaaaccggctaagagatctcgaaagccgaaggggggctctggtgttatgtcttcggaagtggtccgccatttaagggacgagcccgaagaaggagaggagaatttagcctgcgtacgggctaatgttgtgattcaacagtcttccaatttggtggaagcaaatcagggaaccttggccataatcccagaacaagaagaagccgagattatcccttctcgagctaagatgattgaaagggataccgagggtggatcttctcgggcagtagaagatatttcaagggatgagttcgggatagttgacattggcggatcccctcagatttcggatgccatgattcgagaggccgtcatgttggaggatcggtcctatgagggtattcaggagtcggccgatatccatggttttctggaggggctcgagtcaggtgcctcggaggaggttaccggttttggtggaatgccggtacccaaaaaagcatcgtggtcgggttctaccgagccttcatcgattcataaactggtggaccgatttccggccccgagtatcgatcccgaccgaaggcggaagatagtgctctccgtacctgcggatacccgaattttttcttcccctgtggggattgccagttaccttcggtccttggtgaccgaagaagatcaatcagtgatgaatgcggtggggcccgcctgtctcttcaacgaggcccaacatgctttgaatcgggtaactctgatggcgtttttgccgcttcttttacacagagttgtaggtaattctaatgtttctccttttgtttgcaggcttcggtgttgcatcacgaggcctttcttcgaatccgggaggagcatgatgccgaggttcggagcctcactgagaagagtgactcgtacaagctccttagtgaaaaacttcgagcagatttgacagcggctcgggaagagcatgaggagatggctgagcaggtattccgaatgttccatgatagtgaagatgaaaaagagataaccactaacgatccgattctgcaggttcggcagaggatcgagcagattggacggcttaactcacaggtagatgcgctactggccgaggcagaagaatttaaaaagtgtatggatatccttgcctcgaaaaaggaagccgtcgaagctcagttggagctgtctgatgcccaacttcgatctgcgaaagaaaatgctttggggctgatcgaaaagatgaaagagcttcagcatcggttggatttggccactttagataaagcagatttggccaaagaacttgaagtggccagatctgaagtgatcgaggccaataaaagagccgatgccaaagtggctcagttcaggatcgatgtcgaggttaaccaagccaaagctgagagcatggtcgaacatgcaaagtgcaagctcggagagaggctctcgaggaggtcagagctcagggcttcgatgttggggccgagattgaagtcgccagggcggaggagaacaaagctcggaggttggcctttcctgaggaggactccgatgactcgggggagtctgaagatgaggacgatgccgagaatacggcctccgatgaagattgagtcatttagggccttaggtcgatcgctgcgttcttttgataccgctttcggtttttgtataaagaacttccttttggagagtagccgcctctgtacaaaaaatttgtaaatataaatctttcttctttttgaagaaaatagcctttcaaactaaatagatagtttgaatttaaatctctgttgccttcgggccttgtgggtagttttgctcgaaatcggtcccgtaggcttagtagtcgagtgaatgattcgaactcgatgcaatgtagcccgtaggcgtaatggtcgagtgagtgcttgctcgaactcgaaataaaagtagcccgtaggcttagtagtcgagtgaatgattcaaactcgaaataatgtagcccgtaggtaataaagtagcccgtaggcttaatggtcgagtgagtgcttgctcgaactcgaaataaaagtagcccgtaggcttagcagtcgagtgaatgattcgaactcgatgcaatgtagcccgtaggcataataggtcgagtgagtgcttgctcgaactcgaaataaaagtagcccgtaggcttagtagtcgagtgaatgattcgaactcgaaataatgtagcccgtaggcataatggtcgagtgagtgcttgctcgaactcgaaataaaagtagcccgtaggcttagtagtcgagtgaatgattcgaactcgaaatgtagcccgtaggctaatgtcgagtgagtgcttgctcgaactcgaaataaaagtagcccgtaggcttagcagtcgagtgaatgattcgaactcgatgcaatgtagcccgtaggcgtaatgtcgagtgagtgcttgctcgaactcgaaataaaagtagcccgtaggcttagtagtcgatgaatgattcgaactcgatccatcagatcctgtttgcataataaatcttgaacatagaatatcggtaaagaagagggctttctttgcaagtcattatacatgtgttcatgttttgcgtcagggctcgggccaactacataagcatggttcgttttgaccatttggctcttacaacgtttcctgttgagacactgtttgtcatgaaataacgaagtaacttcctttgcaccgaacttgataatcatcacagatgcgttcaatgataaagccccccagtatacgaggttgattttaaagaggcctcggatactcagcagtagtatcgtttccgctatatggctggtatcgatctctggtcgacttttgctttttcgtaacggacctagaaatcaactggtcatcttcgactcttattttggattgatatcgattgtgcacatcggtccaagtaatagctgggtactcgatcagattttgcttcagccgccgtgaagccatcgagctccgctcgtttagaccttgagtgaaagcttgaacagcccaatcgtctgtgactggtggcagatccattcgttccatttgaaaacgagctacgaactcccttagaatctcgttatccttttgtattaccttgaacaggtccgactttctggtttcgacctttatggctccggcatgtgcttttacgaagcaatgtgcaggcatagcaaaagaatcaatggagttagatggtaaattatgataccatatcattgtcccctttgatagggtttcaccgaattttttcaataatacagattcgatctcatcgtcttccaaatcattgcccttaatggcacacgtgtaagaagtgacgtgctcgttggggtcggtcgttccgttatatttgggtatttcgggcatacgaaattttttggggattggttttggggctacattcgagggaaaaggcttttgaatgaatttttttgaatctagaccttttatcattggtggagctcccgggatctggttgaccctggaattatatgtttctatttttttatcgttggcttcgactcgttttgtgagttcctcgagcaatttagtaatttcgggagtagtccccgattcttgctcgtttgacttcactatggctagttccgttatgtgggttacttctcgaagcggattgggctccggcttgctttgtacctgagtttggctctgcaactgagctatcgctatttgctgggcttgtaacatctcaaagatcatccgtaagctgactccgatctcgtccacgttatgggtgtctcgagctacggatcgagtaccacactgaatgcttctttccggttcagaacgctgattcgcccctatagctatttgtgaattgacatccaatggtacttcggctcgaattttgggtgcttcgattcgagcctcagtgccatcatcgagtggccttctagccccgggtgccaagttgctggtttcatcttgaaggtcggcttcatggtcgataggtgaagccattgctgatttgaagttgcaaactggcgtgtactttagatttatatcaaatgatcactgttacccttagccccacggtgggcaccaaactgtttaccggaaaaatcggataacgttagatttgtgtatggttctaaggatatgcgatacaattcaatataaatcgtgtagagaaatggaaatatgtgtattgttgactgtgaggatgaaaataataagcaaaaagaatgaataagtaaaacaagcacaaggggataactatcaatataagaagtgatcttcttttttcggggtccatagcttacaaggattcccccttttatagaagaggatcattacaaaaaataataaaataaaacatatagtggatggcccatgatgacttgtctcttccttgattcctgccaagattctctctcttggtgnnnnnnnnnnnnnnnnnnnnnnnnnnnnnnnnnnnnnnnnnnnnnnnnnnnnnnnnnnnnnnnnnnnnnnnnnnnnnnnnnnnnnnncttgtctgtgagctcgatactagctcgaactcgtaacttggtcgggccctacggtattggatcgagttcgaccttcgagatgggcgtcgcgcatttccgacctcgaagcagtgccttgcggatcgattaggtcacatgctcgataggattatcgagccgcctcctcgagtgaccttcgggctcgaggtttgttagtaccgacctcagagctcactcccaaatctcattctgactttttaacgttcgaactcgatcgaacgtagaaaggccgaaatctatttcgaccgtatacaatatagttgtttactcacttttcaagaaggaaatataatattcattacatataatagattatcagttcacattatttatttctcttgaaattttacaataatgaatgttaaaagcacaatatgcgggtgtttgaaatgtaatcttcgtggaagttcctaccaacatatcaagaaaaaaaaaactgaaaatgtataagtagcagtagggtttcaaacattccattnnnnnnnnnnnnnnnnnnnnnnnnnnnnnnnnnnnnnnnnnnnnnnnnnnnnnnnnnnnnnnnnnnattttgttagtgaaagtgcaacaaattaaactagtcatccaaatattatagggaaaagaaaatgaatccagctgatgaaaccttatctttctctgaccttgatttccttgaatctatcaagcagaaccttttgaatgatccaattttttttgagaatttttcaaatgacgcggcattgtctaatagccctagctcaagttcagtagaaaacagctttaacacctccctttgtgatgaaaactgtgaaaagtccgagtccgaggaggaaagaaaggggcctatggaggcgcgtgagaaaaatgtgccgcaagattggaggcgctacataggagtgaggcggcggcaataggggacatttacggcggacataagagatccgaataggagaggcgcgagactgtggctaggaacgtatgagagtccggaggatgcagcattagcttatgaccaagctgcttttgagattcgcggctcgaaagcacggctcaattttccgcacttaattggctcgaacataactaagccggctagggttacagcgaggtgtcgtatgcgctcaccggagtgtcacgacccaaaatcccaccacaggagtcgtgatggcacctagtctctaagattaggtaagccgatttccattgcatttttttgaagccatttttttaaaataaataaataatcaaaactaacagcgaaaataattataatatacaacctcccaagacatgtagtactgagtcacgaactctaattgaagacatagaatgatcacgaggaccgaatatacaatactgtttgattacaaattaacagtacaatgaaatgaaaagactccaagggactgcgacaaccaagcagctctaccttgaatccttacgatcccgctttaactctgctcaagtccgttattttcaatacctggctctgcacaaaaatgtgcagaagtgtagagtgagcacaccacagcggtgcccagtaagtatcaagactaacctcaatggagtagagacgaggtacactcaagacactcactagtctaataacttatgcaatataatatacaaaataatagaaaacaaataatcataaaggcaggataaaacaaccagtgatatgcacaacagacaacaagaataccattaattcttccagataactctctttcaaatataatttttctcaaataattatttttcaaatataattctttcaataaatcttttcaaatacaatttcctcaaataaatatctttcaaaatacaattcttttatataatactttctaagtaaaaatccttccaaataaatattttgaatataattctttcaattaaaaagtcaccatgtgatacctcatttcaaaatcatcaaaatacgggtctcagcccattttcatatttttcgtaaatacgggtctcagcccatttttatatttcaacggcacctcgtgcccataattaaatcatcatatctgcccgacacctcgtgtcctcgtttcatgtcaaactgcacggataattcacgtgccaaatatcattatcattttatcacagcacctcgtgccgacattttatatcaaaactgtacggacaattcacatgccaatatccccatttcatatcataattcacggcaccttgtgcccacattttattttataaaccgcctggcaatagccacaggctcccaatttcaacataaatcaaattattattaatttactaacaacaagacaagttgcacaaggtataaaaataaacacaagaaaatcacaacatcacatgaaaattgtcaacaccacaacccacatcatcacatatcgtccctgacaatagccaccttatcaattgccacccttatcgctcctattgccacccttatcgctcataggcacccttatcgctccgcccagacaataccaatagccacccttatcgctcctattgccaaccttatcactcctatagccacccttatcgctccgcccagacaatattctaacaaacacaacagtgaaatgctactcttataaccacataatatcaacggtgaaatgccacccttatggccccaaaataacaaccaatttacacgaaaaattatcacagcaacataataaaatctattcttatcacaatttgtccaatggccacaaccaaatttcaaagatatgacaaaatcaattaatttcacaacaaatagcccaaggctccacacaatgtatataacacccaaaaataatcaatggagatagaaattactcaacataaagcaaagtcttcattaaattcaaatttttaataattatataaacacctcttcttaagctcatttaattaattatttgtagaggaaaattcatattggaattaattttcaagaaatattaaaccaacaatactcacgaaagttcataaatatttcaaataacaatcacatcaaattatcatataaaaacaaattcaacaataaggatttaggcatggcaaatagatgatttaataatttttcataatttcctaatttactacacaaaaatgcctaagactttaattcaatgaatttttgcacgtataatcccgagtacgtactagtcacctcgcgtacacggcttttcacaattcacaaatggcacataagactcaatgcctaaggggtaattcccccactcgaggttaagcaagacacttaactttttgaagttaagccgatattccaaaatagccttcttgcttgaattgaccttcggacagctcaaatctacccaaattatttgtataacttcattaaaattaatcggaaacaattccggataataatgcgtagacataaaattttatttcaaagagtcaacaaaagtcgacgcggggcccgcccctcggaacctgacaaaactttcatgaaatccgaacacccattccgatacgagttcaaccataccaattttatcgaattccaataacaactcgacctccaaatctaaaattttcgttttcaaatccctaagttcaaacctccgatttatacctcaaaaccatgtaatctaatctgattattcgatgataatttaatattatggagtagaaatgatcacaagggacttacctcaagttttcccgtgaagaccttgctcaaaaatcgcccaacccgagcttgaaatgcccaaaaatggctaaagcttggaacccctctgtttttgtattgcccaggggttttcgcatccacggtaatttcttcgcacctgcggcttcgcacttgcggtaaaggtttcgcacccgcagctttcgcatccgcggcaaaattttcgcatccgcgacaaagtattcgcacccgcggtgcctggccagcctatgaattttccgcgactcatttctcgcatccgcgagctcgcacctgcggtcctttttcgcgcaggtgcgatcacaccagcaacccagctgctttagctcctcctccaaatccaaattcgatccgttaagcatccgaaactcacctgagaccctcgggaccccgtccgaacatacaacaaattccataacataacatggatctactcgaggcctcaaatcatatcaaacaacatcaaaacgacgaatcgcacctcaaatcaaaatttatgaactttgaactttcaaattctatatcttgtgccgaaacatatcaaatcaatccggaatgacttcaaattttgcacacaagtcataaatgacataacagacctattcaaatttccataatcggattccgatctcgatatcaaaatgtcaacccccggtcaaacttcccaaaaatttaactttcgatatttcaagcttaattccactacagacctccaaataatttttccgacacgctgttaagtccaaaatcaccatacggaactattaacatcatcaaaattccatttcggagtcgttttctcaaaagtcaattctccggtcaactctttccatttaagcttcaaattaaggattgttcgtttaatttaatttcgaatctttagtaaatcaaaatcgaccacacccgtatgccataatacatattgcgaagcttctcgagaccttaagtcattgaacagggcataaattcttaaaacgacaagtcgggttgttacattcttcacctcttaaacaagcgttcgtcctcgaacatgctaagaatctttctaaggactttaaattactgagtatattcttgcactcgtactagtgagtgattttatattcccgcaatttaacacgggtccgacaacaccatctcaattgagattatttcttttctccattcttataagctttagagcaaaagtccctaactctccattcattttcaaaatacttgtttttcactttgacgcatggtattagtctcaactagctacagcaactcatgcctatgcacacatcaaattttatggggtatttcattcttccccgcttaggatcattcgccctcaaacacacaacataacttatctcttctttcacacatctcaatcccccaaatttttctaactcccaaattatttttttcagaaaatttcggcagagtctcccctgtaattgggcctatccacctgccagagtaacacccaaacaactcctaacaacatatccacaacccaacaaaataccacagggtatatatcaataacattaatctcgacatcacaagcactgcattaccataatgatatcaggacatgaagcacatcatatgtatgcttatcaccacatctctggtcttaaaagttgttcataattaattccagcatcatcaattaatctcatattaaccaccacctcattttgaattttcacaacactaacaacggaatgtgaggcatgaagacctcatgattacttactcggattaatgagtcacatttaacgccacatgggcactcacctcataggctaaaactcaatatttacagcacgaaaatggctgaatatgaacagaaaatatacaagcattatcaaataagcctaaccggtatgtctccctattaatattattgcacaaattaaatttcacaagggagaatattaaactcataaacatttcaccacaaggacctcgtccttatataacttccatcgcggcttgcaggccggtataaatatttcacatcatgtaaaaatgcgaagatctcgtcatcaaatccgaattacaattatgttgcacattatgccaactgaaattttcaatttcctttatttcttcctttcaatacatttcataaataattttcacaacatataatgaactctcataccggtagggcgtataattcataaaaattggaatcaattattctgaaaatcattaaacccactgtaatgaataataaaaattatttttggacttatagccctcaatagtgtacagaaataaaataacagacacggactcacnnnnnnnnnnnnnnnnnnnnnnnnnnnnnnnnnnnnnnnnnnnnnnnnnnnnnnnnnnnnnnnnnnnnnnatctttaaatctcccaacatggataaacatataagtgggtcacaatttttcgaagctcaccataagtggagcataataggaggactcacctcattattcagaactaaatcatattaagaaaaatatccttttataataaaaatcaggatcgtaccttcaacgacaccatcttgtatattggccccagccaaatcatagtgattatatcagtgggtcgggtctacacctcttaggcgcccactacccgcatgtcctccacctctagctgactgtgcacgtggagtatcaactggaataaagcttgtagctggagtgttctgatgaaatccacccctcccaagtctgggataatctctcatgatatgcctagtatcaccacactcataacaacccctatgaggtcgcggttgcttgtactgagcctgtgccggataactggaataaccactgtaagaatctcgtgtcggtggtgcactataaattggagcaccccgagtaatctgatgtgtggactgacctgactgactgctcgagcctccgctataatgggttctagctgaagagtaaaacccactgaaccctccagatcttcgagaccttttggcctccttagacttcctttcctctcctaaaacaccctcaatcttccttgcaatctccacactagttgaaatagagtatcagtttgcaattctcgagccatgcatattttaatatcataatcgagcccctcaatgaatctacggacccgttctctgattgtaggaaccaagatcggtgcatgacgagctaactcattgaacctgatagcatattctgacactgttatagtgccctgacgcaatcgttcaaactctgtgcgccacgcatctctgagagtctggggaacaaactctttcaagaacatttctgaaaattgagcccaagttggtggtgttgcatcagatggtctaccttcttcatagatttgccaccaccgatacgttgcgcctgacagttgaaatgtagtaaaggtggtgcggagaatacggtgacaattttcttgaaattcttgggcatcctctatagttgtgccactgaaagtaggtggactatacctcttaaacctttcaagtctcttttgttcttcttctgatgactcgggcctgacctcaggctgaaccggaataacaggttataccggtattgcacccggaacctgaccaacgtgaacctgctgctatggaattatggtaggagtctgatctactcccccaatctgcgaaatatttggtgcagcagagatcaatcccgcctgagttaatgtaccaaacatactcatgaactgtgctaaggtctcctaaagtccaggggtaacaacaagtgcttctggtacctgtcccccaactggagctactagtggctcctcaactgttgttctgacaggtgctctagtcgcaggtgcccttcctcgaccctcgcctctacctcggccccggccttttgcagccctaacagtatgtacggatacctgctcagctaacccagtagcacgtgtcctcaccatatgtgagagaatggagatacaaaggttcaaattccaaattcaacaaattccgcacgataagaatgaaagaaatggaaatttcctaacagttttgtaacctctcaaagataagtacagacgtctccgtaccgatccgcaagactctactagactcgttcgtgactcgtagaacctatgaacctagagctctgataccaacttgtcacgacccaaaatcccaccacaggcgtcgtgatggcacctagtctctaagactaggtaagccgatttcaattacattttttgaagccatttttttgaattaaataaataatcaaaactaacagtggaaataattacaatatacaacctccaagactggtagtactgagtcacgaactctaattgaagacatagaatgatcacgaggaccgaatatacaatactatttgattacaaattaacaatacaatgaaataaaaagactccaagggactgcgacaacgaagcagctctaccttgaatccttacgatcccgctttaactctgctcaagtccgttatcttcaatacctggctctgcacaaaaatgtacagaagtgtagagtgagcacaccacaacagtgcccagtaagtatcaagactaacctcaatggagtagagacgaggtacagtcaagacactcactagtctaataacctgtgcaatataatatacaaaataataggaaaataaaaaatcataaaggcaggataaaacaaccagtgatatgcacaacagagaacaagaatactattaatatcactcaataattcataaacacaattacacccaattaaatcaagcccttcaaataaatgtctttcacatagttcttccagataactcactttcaaatacaatttttctcaaataattatttttcaaatataattctttcaataaatcttttcaaatacaatttcctcaaataaatatctttcaaaatataattcttttatataatactttctaaataaaaatctttccaaataaatattttgaatataattctttcaataaatcttttcaaatacaatttcctcaaataaatatctttcaaaatataattcttttatataatactttctaaataaaaatctttccaaataaatattttgaatataattctttcaattaaaaagtcaccatgtgatacctcatttcaaaatcatcaaaatacgggtctcagtccattttcatatttttcgtaaatacgggtctcagcccattttcatatttcaacggcacctcgtgcctataattaaatcatcatatctgcccgacacctcgtgtcctcatttcatgtcacaactgcacagacaattcagtgccaaatatcattatcattttatcatagcacctcgtgccgacgttttatatcaaaacggtaaggaacaattcacgtgccaatatccccatttcatatcacaattcacggcaccttgtgcccacattttattttataaaccgcctgaaaatagccacagactcccaatttcaacataaatcagattattattaatttactaacaacaagacaagttgcacaaggtataaaaataaatacaagaaaatcacaacatcatatgaaaattgtcaacaccacaaccctacatcatcacatatcgtccctgacaatagtcacccttatcgctcctatttccacccttatcgctcctatagccacccttatctctccgcccagacaataccaatagccacccttatcgctattattgccacccttaacgcttctatagccacccttatcgctccgcccagacaatattctaacaaacacaacagcaaaatgccacccttataatcacataatatcaacggtgaaatgccacccttatctccccaaaataacaactcacacaacacaacaatttacatggaaaattatcacaacaacataataaaatcaattcatatcacaatttgcccaatggccacaaccaaattccaaagatatgacaaaatcaattaatttcacaacaaataatccaaggctccacacaatgtatataacacccaaaaacgatcaatggagatagaaattactcaacataaaacaaattcttcattaaattcaaattttcaataattatataaacatctcttcttaagctcatttaattaattatttgcagaggaaaattcatattggaattaatttccaagaaatattaaaccaacaatactcacgaaatttcataaatatttcaagtaacaatcacatcaaattatcatataaaaacaaattcaacaataaggatttaggcatgacaaacatacgatttaataattttccataatttcccaatttactacacaaaaatgcctaagactttaattcaatgaatttttgcacgtataatcccgagtacgtactcgtcacctcgcgattttattatgttgttgtgataattttccgtgtaaattgttgtgttgtgtgagttgttattttggggagataagggtggcatttcaccgttgatattatgtggttataagggtggcatttcactgttgtgtggaatattgtctgggcggagcgataagggtggctataggagcgataagggtgggaatattgtctgggcggagcgataagggtggctataggagcgataagggtggcaataggagcgataagggtggctattgtcagggacgatatgtgatgatgtggggttgtggtgttgacaattttcatgtgatgttgtgattttcttgtgtttatttttataccttgtgcaacttgtcttgttgttagtaaattgataataatctgatttatgttgaaattgggagcctgtggctattgccaggcggtttataaaatgaaatgtgggcacgaggtgccgtgaattgtgatatgaaatggggatattggcacgtgaattgtccgtgcagttgtgatataaaatgtgggcacgaggtgctgtgatgaaatgataatgatatttggcacgtgaattgtccgtgcagttgtgatatgaaatgagggcacgaggtgccgggcaaatatgatgatttaattatgggcacgaggtgccgtgaaatatgaaaatgggctgagacccgtatttacgaaaaatatgaaaatgggctgagacccgtattttgatgattttgaaatgaggtgtcacatggtgactttttaattgaaagaattatattcaaaatatttatttggaaggatttttacttagaaagtattatataaaagaattgtattttgaaagatatttatttgaggaaattgtatttgaaaagattattgaaagaattatatttgaaaaataattatttgagaaaattatatttgaaagagagttatctggaagaactatgtgaaagacatttatttgaagggcttgatttaattgggtgtaattgtgtttattaattgttgagtgatattaatggtattcttgttgtctgttgtgcatatcactggttgttttatcctgcctttattattatttgtttcctattattttgtatattatattgcacaggttattagactagtgagtgtcttgactgtacctcgtctctactccattgaggttagtcttgatacttactgggtaccgctgtggtgtactcatactacacttctgcacatttttgtgcagagccaggtattgaagataacggacttgagcagagttaaagcgggatcgtaaggattcaaggtagagctgcttggtcgtcgcagtcccttggagtcttttcatttcattgtactgttaatttgtaatcaaacagtattgtatattcggtcctcgtgatcattccatgtattcagttagagttcgtgactcagtactaccagtcttgggaggttgtatattgtaattatttcgctgttagtttttgttatttatttaaaaaaaaatggcttcaaaatgtaatgaaatcggcttacctagtcttagagactaggtgccatcacgacgcctgtggtgggattttgggtcgtgacaagttggtatcagagctctaggttcataggttctacgagtcacgaacgagtctagtagagtcttgcggatcggtacggagacgtctgtacttatcttcgagaggctacagaactgttaggaaatttccatttctttcattcctgtcgtgcggaatttgttgaatttggaatttgaacctttgtatctccattctctcacagatggtgaggacacgtgctactgggttagctgagcaggcatccgcacatactgctagggctgcaagaggccggggccgaggtagaggtcgaggaagggcacgtgctgcgactagagcacctgtcagaacaacagttgaggagccactagtagctccagttgggggacaggtaccagaagcacctgttgttacccccggacttcaggagactttagcacagttcctgagtatgtttggtacattaactcaggcgggattgatctctgttgcaccaaatatttcgcagattgggggagtagctcagactcctaccacaactccagagcagcaggttcacgttggtcaggttccgggtgtagtaccggtacaacctgttattccggttcggcctgaggtcaggcccgaggcatcagaagaagaacaaaagagacttgaaaggtttaagaggtatagtccacctactttcagtggcacagctacagaggatgcccaagaatttctagaaaattgtcaccgtattctccgcaccatgggtattgttagttgcctttactacatttcaactgtcaggcgcagcgtatcggtggtggcaaatctatgaagaaggtagaccagccgatgcacaccaccaacttgggctcaattttcggaaatgttcttgaaagagtttgttccccagactctcagagatgcgtggcgcacagagtttgaacggttgcgtcagggcactatgacagtgtcagaatatgctatcaggttcagtgagttagcccgtcatgcacctatcttggttcctacaatcagagaacgggtccgcagattcattgaggggctcgattatgatattaaaatatgcatggctcgagaattgcaaactgatactccatttcaacaagtagtggagattgcaaggaagattgagggtgttttaggcgaggaaagggagtctaaggaggccaaaaggtctcgaagatctggagggttcagtggattttactcttcagctagaacccattatagcggaggctcgagcagtcggtcagctcagtccgcacatcagattactcggagtgctccagtttatagtgcaccaccgacacgagattcttacagtggttattccagttatccggcacagactcagtacgagcagccgcgacctcagaggggttgttatgagtgtggtgatactaggcatatcatgagagattgtcccagacttgggaggggtggatttcatcagaacactccagctacaagctttattccagttgatactccacgtgcacagtcagctagaggtggaggacaggcgggtagtgggcgcctaagaggtggaggcccgacccgttgatttaatcactatgatttggctgaggccaatacaccagatggtgtcgttacaggtacgatcctgatttttattataaaaggatattttccttaatttgattcggttctgaatattgaggtgagtcctcctattatgctccacttatggtgagcttcgtaaatttgtgacccacttatatgtttatccctgttgggagatttaaagatgtgagccgtgtctgttattttatttctgtacaccattgagggctataagtccaaaaataatttttattattcattacagtgggtttaatgtgtttcggaataattgattccaatttttatgaattatacgccctaccggtatgagggttcattatatgttgtgaaaattgtttatgaaatgtattgaaaagaagaaataaaggaaattgaaaatttcagttggcacaatgtgcaacataattgtgattcggatttgaggacgagatcctcgcatttttacatgatgtgaaatatttaaaccgggctgcaagccgcgatggaagttatataaggacgaggtccttgtggtgaaatatttatgagtttaaaattctcccttgtgaaatttaatttgtgcaataatattaatagggagtcatgcctgttaggcttatttgataatgcttgtatattttctgttcatattcagccattttcgtgctgtaaatattgagttttagcctatgaggtgagtgcccaggtggcgttaaatgtgactcattaatccgagtaagtaatcatgaggtcttcatgcctcacattccgttgtcagtgttgtgaaaattcgaaatgaggtggtggttaatatgagattaattgatgatgctggaattaattatgaacagcttttaagaccagagatgtggtgatgagcatacatatgatgtgcttcatgtcctgatatcattatgataatgcagtgcttgtgatgctgagattaatgttattgatatataccctgtggtattttgttgggttgtggatatgttgttaggagttgtttgggtgttactctggcaggtggataggcccaattacaggggagactctgccgaaattttctgaaaaatttgggagttagaaaaatttgggggattgagatgtgcgaaagaagagataagttatgttgtgtgtttgagggcgaatgatcctaagcggggaagaatgaaatcccagaaaagttgatgtgtgcataggcatgagttgctatagccagttgagactaataccgtgcgtcgaagtgaaaatcaggtattttggaaatgaatggagagttagggatttttgctctaaagcttataagaatggagaaaagaaataatctcaattgagatggtgttgtcggacccgtgttaaattgcgggaatgtagaatcacccacaagtatgtgtgcaagaatatactcagtaatttaaagtcctcagaaagattcttagcacgttcgaggacgaacgtttgtttaagaggtggagaatgtaacgacccgacttgtcgttttaagaatttacgccccgttcaatgacttaaggtctcgagcagcttcgcaatatgtattatgacctgcgggtgtggtcgagtttgatttactaaagattcggaattaaattaaacgaacaatccttaatttgaagcttaaatggaaagagttgaccggagagttgacttttgagaaaacgactccggaatggaattttgatgatgtcaatagctccgtatggtgattttggacttaggagcgtgtcggaaaaattatttggaggtctgtagtggaattaagcttgaaatgccgaaagttgaatttttgggaagtttgaccgggggttgactttttgatatcgaggtcggaatccgattctggaaatttgaataggtctgttatgtcatttatgacttgtgtgcaaaatttgaagtcattccggattgatttgatatgtttcggcacaagatatagaatttgaaagttcaaagttcatagattttgatttgaggtgcgattcgtcgttttgatgttgtttgatatgatttgaggcctcgagtaggtccgtgttatgttatggaacttgttggtatgttcggacggggtcccgagggcctcgggtgagtttcggatgcttaacggatcgaatttggatttggaggaggagctgaagcagctgggctctggtgtgatcgcacctgcgcgaaaaagggccgcaggtgcgagctcgcggatgcgagaaatgagtcgcggaaaattcatgggctggccaggcaccgcgggtgcggccgcggatgcgaaaaggtgcgcgggtgcgaaaatttgtttgtataacttcattaaaattcatcggaaacaatttcggataataatgagtagacataaaattttattctaaaaagtcaacaaaagtcaacgcgggggcccgcccctcggaacctgacaaaactttcatgaaatccgaatacccattccgatacgagttcaaccataccaattttatcgaattccaataacaactcgacctccaaatctaaattttttgttttcaaatccctaagttcaaacccccgatttacacctcaaaaacatgtaatctaatcggattattcgatgataattcaatattatggagtagaaatgatcacaagggacttacctcaagttttcccgtgaagaccttgctcaaaaatcacccaacccgagcttgaaatgcccaaaaatggcaaaaactcggaacctctctgattttgtattgcctaggggttttcgcatccgcggtgatttcttcgcacctgcggcttcgcacttgcggtaaaggtttcgcacccgcggcaaattttttgcacccgcggtgcctggccagcccatgaattttccgctttcgcgactcatttctcgcatccgcgagtcctttttcgtgcaggtgcgatcacaccagcaacccagctgcttcagctcctcctccaaatccaaattcgatccgttaagcatccgaacctcacccgaggccctcaggaccccgtccaaacataccaaaaaatttcataacataacatggacctactcgaggcctcaaatcatatcaaacaatatcaaaacgacgaatcgcacctcaaatcaaaatttatgaactttgaactttcaaattctatatcttgtgccgaaacatatcaaatcaatccggaatgacttcaatttttgcacacaagtcataaatgacataacagacctattcaaatttccagaatcggattccgacctcgatatcaaaaagtcaacccccggtcaaacttcccaaaaatttaactttcggcatttcaagcttaattccactacagacctccaaataatatttccgacacgtcgctaagtccaaaataacctacagagctattgacatcatcaaaattctattccggagtcgttttctcaaaagtcaactctccggtcaactctttctatttaagcttcaaattaaggattgttcgtttaatttaattctgaatctttagtaaatcaaactcgaccacacccgtaggtcataatacatattggaaactgctcgagaccttaagtcattgaacggggcgtaaatttttaaaacgacaagtcaggtcgttacacggagccatcgtcttattagcttcttcagaaaataggacaaggaaaaggaagatagatgtgataaactccatagctaaagcaaagtttattcgtcatagcttgattaatctgcaagtgttggtataattgtgaggaatttaggtttcttcgtgtttgacaattgcaatattctcaaagaagaagaaaaaaaaagctgctggacgacgacttgtaaatgtactttctcttacgtgaccttttatttaacgagattacttagttgaaagataaatcacttcataaatgtcgttttttctatcaaacctctctataacagatctatatataacattcattcactataaaagctaagtttttctcaaaactaatttttaagttatattttacctctctataacagtttttttacctgtaacatcaacaaccatatttatagcagaacattctttgtaaaattacccttccatatatattctttaagattactaataataactctaaaaatatgtacaatcttttccgttaaataatgtttctatcttgcataaaatataagatttgaagatttgcacatgataacttttccattggacaaattccaaaatatatgtggatagaatatttaactattaagctcttagattgtcttcaaggaaaaactattgaatacctttttgctaaaaatttggacacaaatcttcgccaattcaagcgttatattgctagtaagagaatgaaatctacgaaacaagctacaattacaacgtacttacatcactcttgaaagaatttatttttgctaggtagttttaaaatgtctgccttggagtttaaatctttatatgtttagttgtgaatttactaataacatattagctttcttcaatatttaactagtgaaaaatgcatatcttttgagattttaaatttgaataaattttttatcttttatatgtaatattaaaaagaaaaaatctatttttggataattttatctataacaactaaaaaaatatttaaccgtcaaatgctgtgtttaacagccattcactataaaagccaaaatatatcggaacaaacgaggttattatagagagggttgactgtaaaagccttaacacaaaaggatgacaagaggtaaaaaatgttagagtgagaagcgagcttctctctactgtaacagtccggcttgtcgttttgaatatttacgctcctttaaactatttaaaatcttgagtagcttcatatgatgtattatgaccagtgtatattgtcggctttggttttcggatgattcaggattaaattgaaagaacaatccttgtttagaagcttaaaggcaaagggttgaccggagtttgacttttgtgcaaacgactctggaatggaatttgatggtttcgataactctgtatggtgattctgaacttaggagtatgtctggatatttattttgaagtccgtagttgaatttggcttgaaatggcgaaaataagaaattgaaggtttggaagtttgaccgaaacttgacttttatgatatcgaatccagattgtgattccagaaattttagtagcttcgttatgtcatttatgacttgtacgcaaaatttgagctcattctggattgattttatatatttcggcgcgaaatttggaagttgaaagatttaaagttcattaagtttggattgaggtgcaattcatcgtttcgacgtcgtttcttcaagcataagttatatcacattaagcaaatgagttccaaattcagtgttgattgaagcattagacccgtattaaaattacggaaccatagcaaaaagaatcatcgaatgcgaacattgtacaagagagttatgctaatttccgggcgaaatagaaaagatttcttatcaccagcgccaagggcagcgtgtggcgctggaatttttgaggctctggaaactgggccacaggtagcgccccacgctacctgtggcgctcaaacattaatccctataacggaggatttcaccatttttgacataaacaaagttggggagctcgatttgggcgattttaagaggcaaatttcaccacaaaacttggggtaagtgttcttgacttccttgtgattatatttcatgaattaatcttcgtttttggcgttagattattgatttttcaagaaaaatcggagaaattttctacaattccataaaataaattttcgagttttgaacactgatttggagtcggatttgaatcaaattagtatggttggactcgtaattgaatggattgtcagattttataagtttcttcgggttccgagatgtgggccccactgttgatttttgagttgaatttcgaatttttgttggaaaatttagcattttcatattgaattgattcctacatccactacaagaaattaggtttttagtgacgatctttagtggcgacggttcttgttgccacaataatactagttttagtggcgactaaaacatgtcgctactaaaataatataaatttagtagcgacctacattatcgcctcaaaaagctggttttagtggcgactttaccgaggtcgcccctagtagttactaagtttttattttgaaactttcctgtagaataatttgtagcgacctttaaatacttgccacaaaattgtatttgtagcgacaaagtcgctactagttatattactaatcttttttatgtttttggattatatcgcttaaacttaagaaagagaatatgctgccagtgtttcctttatttcccttgtttccccaaatcccttcccctttctcccaaaaccctagccgatgcaaaaatgtttcttaaatcccttcttctgctcttcccaaaccttcactactgttagatctaatcgccgttcagctctcacccgtggctgttaaaggacttagagttgaaagttgtgaccataccatgaaattttggaagaagttggggactattctgtgtgccgttgtgtttggaagatttttatgacggatgtgatttctttctctgtaaagaagagaattcgttgatccttcttagggtcttgggactcttgtttacacatattttacctagaagaaattcgattatcaggcatttggagccaaattcaaggtaaaagtggatcattcatttttacgaattattatgatgtttcagtttatatatttttcgttttttcccctttaaatttggaactcaattaaatgtgattctaatttattttcttttctgttaattacatattatatttgttgttctcttccgaactgtagatactttaaaaagtaacttcttgatttttcttcttagatcaatctaattttgtttttgtttgtggcttttgttttttgtttttaattggtaacaagtgtggtcctttgttttgtggcttgtgttccgtagatagtttcttatgtggtcacaaggacatatatgacgggttgaaaaggttgggtaattggctatattgcaataaagttttgattcttgaacgtatgatttagtattaacttgagtagagaaataataatcatttgagagaaggaggaactgtaatttgatttactaggatgatatttgggatactactaaagaatacgttgaaaagaaaaagaacctcgttagcattcgatcccaacttttcatcagttaattttagcacttctttaaaaacatataatgtaattcttatattacaatctggttgtaattgaaattcttgaaccatatgaacaaatgataaattttttgatcactttgttccttttggtggagtcttaaagttttgtaacgacccgactggtcgttttgagcatttgtactttttctcggtagtttgagggctcgagtttctccgcatgatgtattatgatttgcgtaaatcgtcggtgttggtttccaagttatccggaatcgatttggaagaatgaacttcaagatttaagctctaagttggaagagttgaccaagtttgaccttttagcatnnnnnnnnnnnnnnnnnnnnnnnnnnnnnnnnnnnnnnnnnnnnnnnnnnnnnnnnnnnnnnnnnnnnnnnnnnnnnnnnnnnnnnnnnnnnnnnnnnnnnnnnnnnnnnnnnnnnnnnnnnnnnnnnnnnnnnnnnnnnnnnnnnnnnnnnnnnnnnnnnnnnnnnnnnnnnnnnnnnnnnnnnnnnnnnnnnnnnnnnnnnnnnnnnnnnnnnnnnnnnnnnnnnnnnnnnnnnnnnnnnnnnnnnnnnnnnnnnnnnnnnnnnnnnnnnnnnnnnnnnnnnnnnnnnnnnnnnnnnnnnnnnnnnnnnnnnnnnnnnnnnnnnnnnnnnnnnnnnnnnnnnnnnnnnnnnnnnnnnnnnnnnnnnnnnnnnnnnnnnnnnnnnnnnnnnnnnnnnnnnnnnnnnnnnnnnnnnnnnnnnnnnnnnnnnnnnnnnnnnnnnnnnnnnnnnnnnnnnnnnnnnnnnnnnnnnnnnnnnnnnnnnnnnnnnnnnnnnnnnnnnnnnnnnnnnnnnnnnnnnnnnnnnnnnnnnnnnnnnnnnnnnnnnnnnnnnnnnnnnnnnnnnnnnnnnnnnnnnnnnnnnnnnnnnnnnnnnnnnnnnnnnnnnnnnnnnnnnnnnnnnnnnnnnnnnnnnnnnnnnnnnnnnnnnnnnnnnnnnnnnnnnnnnnnnnnnnnnnnnnnnnnnnnnnnnnnnnnnnnnnnnnnnnnnnnnnnnnnnnnnnnnnnnnnnnnnnnnnnnnnnnnnnnnnnnnnnnnnnnnnnnnnnnnnnnnnnnnnnnnnnnnnnnnnnnnnnnnnnnnnnnnnnnnnnnnnnnnnnnnnnnnagtttcgttagttccgttagctccgttggatgattttggacttaggagcgcgtccagattataatttagaggtctgtagtcgaattagtcttgaaatgacggaagttggatttttttgggaagtttggccgggagtggactttttatatcggggtcggatttcgattccggaagttggagtaggtccgtaatgtcaaatgtgacgtgtgtgcaaaattcgaggttaattagacgtgttttgataggtttcggcatcggttgtaaaagttgaagtttcaaagttcattgatttttacttgaggtgcgactcgtcgtttcgaggttgttatgcgtgatttgaagcctcaagtaggttcgtttcgtcatatagaacttgtctgcaaaattggcgccatttggagctgatttgatatagttcggacgctcggttacgattctagaggttcttgaagtttactttgatcttcatgcgttttggcgttcgattcatgattctagaggttattttgatgttttgatcactcgagtgagttcgtgttatatttttagacttgtgtgggtgtttggtttggagcctcgggggctcgggtgagtttcagattagcttcggagtgttttggtaagaaccttgagtgttgttctggtttcatcgcatttgcgatgttttggaaacatcgcaaatgcgactaccgcatttgcgaggtagtgttgttcgcatttgcgaacctaggctgctggggactggatcgcatttgcgatgaagttatcgcttttgcgaagtctgaagagttttgcatttgcgaactctgcatcgcatttgcgatgaaggcctggtctgtcaggggtcgcatttgcgatgttttgtctgcatttgcgaaccatttgtcgcaaatgcgacatctgcagcttgctaaatgctgagaattccgagacttagtttcattttgttatattttgaaccctagcttcgatgggaggcgattttgtgaagggattttcataccaaatcattgggtaagtacctctaatcaattctcaactacatttcatgattttacataagatttaacatcaaattcacgagaatctagggaaaaatttggggattttgtcaaaactttaaaaaatgaaaatttaggattcgagagtcgaataggactcggatttggaaacaaaatacgtatttggactcgtgaggctatgggtagtcaagacctacccttgaacccgggttttgatcgggcgggcccgatggttaatttttgttgactttttagaaattatataaaaattacaactttattaattgaaattgttttcccttgcattgtgtggtgtatttaagtcgtctttggctagattgagccgggcggaggtgaatttgtaaaaataaaagctaaattgagtgttgagttagccaaattgaggtaagtgtcttgcctaactttgttgagggaatttttcctactatttgacattgtttgctacatgcgggggtgatacatatatgaggtgacgagaatatatgcatgtgacagggttaaccatgctgggggggtaaattatgttataaattgtgtcttatagaatcacgtgaccttcttgcctcatgccttagttgactcctagatactaagaacatagtattaaatgttagaaactaagacttagcttattacaacttgatcaaatttgatggaattctgagaatacattggtgtgtttaattcggtcatcaatatgcataatcattaatacattgctatggccgatatttttgagagactagattctatacttgtgttgtagatcatttgtgggatttgttggaatacttgaataataatgttcttgcgggtttattgaactattgttggcttggaaagttgtgattgggattcatttggaatatttgtttaaacactctcattgacgttatttatgcttcctgccttgtttgtcattgatatacatatgcttggtaaggaagagtgtaaaacacgaagggtgatgtcgtgcctttgtttatacattatcatgtgagggagagtgtaaaacacgaagggtgatgccgtgccatattattgagagtaaaagcatgaagggtgatgccgtgccatattattgagagtaaaagcacgaagggtgatgccaagcacgaagggtgatgtgatagtattgagagtaaaagcacgaagggtgatgccgtgccatttcatttgtgagtaaaagcacaaagggtgatgccgtgccatgttatgtgagtgtaaaacacgaagggtgatgtcgtgccatttcatttatattatcatgctttaaattatcatgagttcatgatgggtgttttcatgcaggtgaggacgagggacatgcattatgttatgatatctttcctttgtgtatacgttcctgccgttacgttgagctgttattattgtatttatggttcttatgtgacttttcgttaatgccctgttcttgttctttatcttatttgttattgtgtcactcatgccttctacttgctaaacttgcaaataccatgcctacttcctgctgtcataattatatctttgtcgtatctattttggttgcacttagtacatgccttctaccgtgttagtcattcatgcttctacttgttaacgcataaagatcatgtgttcccctcttattcgttatatttgtatttatgcctccaccatgctagttagttgaagttacattccttttcctgattgttgtcatcacctctatgctttccgcctagtctgttactgatgcccatttgtacattctcgttcattattgctacttgggtatttcctactttgtcattactgttatcggcatttctgccatccggttggtactgttgtatgcatatttagtgaggatgagataaatgcacgaagtgtgttgccgtgcaattgacttgatatcagagtatattcctcacgttatgaaagttatggggtgactcttgtggtttattggtttccctctaaggaaaagattggttgagatattggaaactactgaattgtgatctcttctagtactttattattgttttgtacatttgtttcgtgtactctatcctgttatattgtagcatagttctattgctagatttcagtacagatttttattagtgagcatctttttactaaaaagcctcgtcactacttcgacgaggttagacaaaatacttactgggtatatggggtcggttatactcatactacacttctgcacattgcatgcagacttttggagcggagctgctggttatgtcgggagctgaccctgaagatgttcgtacattccggatataactgtcacctgtccttggaggctttagatttcgttaatctgtttatgtagcgttcaaacagatcgtgtaattatttgtatcagctttgtaaattctaagtcttagaagctcatgatttatactatcagttcttgggttaatttgtaaatgtccagataattcttcactatttttctataatttcatttggattgtattgtttgttagttagcttacctagcgggtcgagttaggttccatcacgactagtgatttttgggtcgtgacaagttttcataacaagaataccagttgcagaggctacagatctagtatttctttaaatatatcagttgtaatacatatactatctccaaagtagattatagttgcctgatactcgaacaaaaactatgttgagaaattaaacatgctttagaatgttaaagagaaaagtttaatatataactagtgcaaagtgtactaatctcaatatgtgcattagagatctctagttcttagatattgatatcaatgtgatgtgacccctagctgtaaacaacgcattagtctcaatatatgcatcgatatcaacattatcatatacttaataagtattgtagcagtaaacatggcagatgtaataatatgactgaagtgtgtcaaggtacaatatgctcttgatatctttaccttttaaagaatttttggattacttaagttgcttctctcgttaattcttaaaagcgattgatctaattgtatctatatttgtgttcatgttttagtaatgatccatgtactcggtattatataaattttatcatagcctctatattcatgcacatgtttctatcagctctagatgaaggatggacaaatactttagatactttcacctaccaatgcttggaagtcaccctgaaaacgtgtaatttctgattagtttatatgacttattcaaataaatttgtacgaattcaagaaaattaagtgtacaataaaagcctcattgatttctgtagctacacctaaactaccactatcatagcaaatcacttctattcctgaattctattgtgaattttctagttcaacctgcagaaataataaagcactttggtgtaaaactcctgcattttttaaattatgctcccttgtactagcttttgattttgtgaacctcgcatctcgacaaactacagcagtaaccgaggtaataaaagtttagttactgaacaagaacaaattcaggtcctatactgattagaaccttatcttctttaattagttctcaagtatgaaaaagttattatccaatcattaagttctcaagtgaacactaatcaattctaagtgtcgtctctaaattgcttatcttcttgtgagaattgcttattgctttggaagaatgccgctaaagaacaaatactatggcttatctacctacatgttacttgtaaatagtataacatgcaccagtgaagtggggaagaacgtactcaaaagtcaacaaatgcatgttcagatataggtagttaacttttcatactttttagattcttataatattttttgatttatttgccatacttagtgtggtaatctagagttaacatgatctgtgaacttgtttcagattttattttgtcacccatgctccttttatttttgaacaactaggttatttttatccaacatagcaaatgtctacataattagcaagaaaaaagatgtatattcttagctattttaggctcaattgcaaaatannnnnnnnnnnnnnnnnnnnnnnnnnnnnnnnnnnnnnnnnnnnnnnnnnnnnnnnnnnnnnnnnnnnnnnnnnnnnnnnnnnnnnnnnnnnnnnnnnnnnnnnnnnnnnnnnnnnnnnnnnnnnnnnnnnnnnnnnnnnnnnnnnnnnnnnnnnnnnnnnnnnnnnnnnnnnnnnnnnnnnnnnnnnnnnnnnnnnnnnnnnnnnnnnnnnnnnnnnnnnnnnnnnnnnnnnnnnnnnnnnnnnnnnnnnnnnnnnnnnnnnnnnnnnnnnnnnnnnnnnnnnnnnnnnnnnnnnnnnnnnnnnnnnnnnnnnnnnnnnnnnnnnnnnnnnnnnnnnnnnnnnnnnnnnnnnnnnnnnnnnnnnnnnnnnnnnnnnnnnnnnnnnnnnnnnnnnnnnnnnnnnnnnnnnnnnnnnnnnnnnnnnnnnnnnnnnnnnnnnnnnnnnnnnnnnnnnnnnnnnnnnnnnnnnnnnnnnnnnnnnnnnnnnnnnnnnnnnnnnnnnnnnnnnnnnnnnnnnnnnnnnnnnnnnnnnnnnnnnnnnnnnnnnnnnnnnnnnnnnnnnnnnnnnnnnnnnnnnnnnnnnnnnnnnnnnnnnnnnnnnnnnnnnnnnnnnnnnnnnnnnnnnnnnnnnnnnnnnnnnnnnnnnnnnnnnnnnnnnnnnnnnnnnnnnnnnnnnnnnnnnnnnnnnnnnnnnnnnnnnnnnnnnnnnnnnnnnnnnnnnnnnnnnnnnnnnnnnnnnnnnnnnnnnnnnnnnnagtaagtttaatttgttgaataaaattgatggtgttatccggagtattgatccacgtaatgcatatcccaatatgtattctaatgttttagttgaattatcaaatatttggcaaatcataattcctacttttttgtgggatcccattgggtggttgtttataattcgtacttcttggctctttcagtacagaaacttgagggagattacgaatattttgaaggatacatagcatgaagctaagagagttggtgtgaattagcaattgctctccacgtgtgctttatagaccgcttatatatggtaacgatcatagtttatataccatttgtaaggatagtgaaattatatataacatattgcttaccggtgatttttatttgtcgatggcaaggtacttcatcaactgacattgaaggtggacaaggactaggatgagtttgaagacagagtagtttgaaggcattttgtatttttttagtattctatgtatatacaataaaaatgtaatgtgaagtattggataacttatttgtattagactttttagaaacaaaaagttcatgcaattctatttgataattgattgtttgttttttagttatctacactactaaaaattcgggcaaaaccgtccaaaagaaccaactaaagtgggtcggtaatggccaataaccgtccaaaacgcgactatttatacgtggacggtattttaaaggtcggaagggcataccgaccaaagttggtcggaaattaccgaccaactttggccggtcaattaaattttaaaaaaaaaacaattgccgaaaaaacgaccaaaattggtcgttttttttagcaccaaagtttgtcggtattttaattatataattaacaaatgcaccatctgggaatcgatcaggggtctgtactatggcaggatactattctaccactagaccattggtgcattttattttaagactgtcttttatttcatttatactctttaattgtattttcgcacgaaaataaccgaccaaagttggtcggttttattaaaaaataaaattaccgatcgaattcggtcggttttttaaaatgaaaggcggaattaaccgaccgatttcggtcggttttttttatattaattttaatttattttaaatgaaaaactgaccaaagttggtcggtttcttgaaaaataaatttcacaggactcaaaaatagtttcccgcttttttgcgccaaagaaaaccgaccaatgttggtcggtttcgtaaaaaaaaaccaaaaaaataaaatattttgaaaaaccgaccaactttagtcggttttttggccggttttttgaccgaccaaaattggtcggttgagcgtgatcggtttttgccgaatttctagtagtgctattggtatgttaatgggttagaggaaattatagatgtaactaatttatgaaaattaggttaacagtgggaatgtattagtatactggccatggagaaaaaatctgttttagtggcgactaaactttgtcacaagaacaaataaaatttgtggcaactaaagtcgcagttaaagctcatgcatttatggcgagtagagctgctgctgaagctacaatagtatttgtagcgataattgttgccactgaaaaacacattagtggcgaccagcccaaaaatcaattttgtgaaacttttttgtagcatatttatttacaatttgtggcgacaaaagtcattactaatgtgtagattctgtggcgactttcgatagtcatcgcaaaaaatattcagtaacggttgtgcttgcagcaacccaaatctcgctactatacacctttagtggcgactttcgtggaatttgtagcgactaaagtcgtgactagatacgaagcattcggaggccaattcgcaaggcaaaggcctattagaataaagaattgcacgatttgaggtaagtaacatttataaacttgtagctgagggtataaaccccgaaaatacgccttatatgatttgtttgggggtgacgcacatgctaggtgacgggcgtgtaggcgtgcaccgtagaaactgtgacgtaattgattcagtgaaattgtgtagttaaataatcttggcattgtccatgcactttcatgtgttaaggaaatcgagctgagaatcatgttaaaaatcatgttgaggctatatgccggtattactgagacccacagaggtcatgtttctattgaattatttgtttaaattgtaatttcgtactcagtcatatacattcattgcatatcatatctcagtctctgttgttatttattgatnnnnnnnnnnnnnnnnnnnnnnnnnnnnnnnnnnnnnnnnnnnnnnnnnnnnnnnnnnnnnnnnnnnnnnnnnnnnnnnnnnnnnnnnnnnnnnnnnnnnnnnnnnnnnnnnnnnnnnnnnnnnnnnnnnnnnnnnnnnnnnnnnnnnnnnnnnnnnnnnnnnnnnnnnnnnnnnnnnnnnnnnnnnnnnnnnnnnnnnnnnnnnnnnnnnnnnnnnnnnnnnnnnnnnnnnnnnnnnnnnnnnnnnnnnnnnnnnnnnnnnnnnnnnnnnnnnnnnnnnnnnnnnnnnnnnnnnnnnnnnnnnnnnnnnnnnnnnnnnnnnnnnnnnnnnnnnnnnnnnnnnnnnnnnnnnnnnnnnnnnnnnnnnnnnnnnnnnnnnnnnnnnnnnnnnnnnnnnnnnnnnnnnnnnnnnnnnnnnnnnnnnnnnnnnnnnnnnnnnnnnnnnnnnnnnnnnnnnnnnnnnnnnnnnnnnnnnnnnnnnnnnnnnnnnnnnnnnnnnnnnnnnnnnnnnnnnnnnnnnnnnnnnnnnnnnnnnnnnnnnnnnnnnnnnnnnnnnnnnnnnnnnnnnnnnnnnnnnnnnnnnnnnnnnnnnnnnnnnnnnnnnnnnnnnnnnnnnnnnnnnnnnnnnnnnnnnnnnnnnnnnnnnnnnnnnnnnnnnnnnnnnnnnnnnnnnnnnnnnnnnnnnnnnnnnnnnnnnnnnnnnnnnnnnnnnnnnnnnnnnnnnnnnnnnnnnnnnnnnnnnnnnnnnnnnnnnnnnnnnnnnnnnnnnnnnnnnnnnnnnnnnnnnnnnnnnnnnnnnnnnnnnnnnnnnnnnnnnnnnnnnnnnnnnnnnnnnnnnnnnnnnnnnnnnnnnnnnnnnnnnnnnnnnnnnnnnnnnnnnnnnnnnnnnnnnnnnnnnnnnnnnnnnnnnnntaagcccgagagactggagagattgatgactgagtgaggtcgagggcgtgattgtgaagataattatgggatcgggctgcacgccgcagcagaccatattggctttatatactttattattatatggatcgggcaatacgccgcagcaggccttatatgctttattattatgggatcaggctgcacgcctatcacgacccaaaatccactatatgccgtgatggcgcctaacgccgccgccaggcaagccaacagtgattcaccaaattaattactcattttagtatcttgaaatcaaaattttccttaattgaacagtataaaatagaatttacagagtgaataaaaatatttaaacgaacatcaataatggataacctgaaggaacccccaaaacttggtgtcataagtgcatgagcattttctaaagagtccaataatattacaacatctgtctcgaatgtaataagacagaataaaataaatactataatggagacttggtgtactgcgatgcgtagcttggaatgcaactcacatgaagtctccccaacaggtgtgcctacgcgccaaggtggtcatcagtgaacctgtcagatcctgcacatttggtgcagaagtgaagcatgagtacgtaaatcccagagaagtagtgacgaggggtcgacatcaacacttactagagatccaagaagataatatattaatctataacaggtatgaagtgcacatcaatagtgaagtaaatctgtatatctcaaaagttcccaattataatagagacttggtggactgcgatgcgtagcctggaatgcaactcacatgaagtctcccaaacaggtgcgcctacgcgccaaggtggtcatcagtgaacctgtcagatcctgcacatttggtgaagaagtgcagcatgagtacgtaaatcccagagaagtagtgatgaggggtcgatatcgacacttactagaggtccaagaagataatataataatctataacatgtatgaagtgcacatcaacagtgaagtaaatctataaatctcaaaagttcccaattatttcctttaaaatatgaatttctcaatcttgtattctatcttaatatctccgaaagttgtcaagtgccatcatcaaataaactcggagtaccatataaaatactgggcatccatagggaggttaactcatgaatattcgggctacaagcgatataacgcacgattctgccgaggtcgttcggcccgattcggaataatgtgtacactgccgagggtcgagcgacacgaaccatagatgcatctatatactgccgaggcattcggcccgatacacaagaaacaggaaggattacgagacacgtgtttacaatacaacacaaaatgaatttaacctttatcatttctcaaatagctcgtccacatctcaaagtgttaaggctcagcctagtgtacatatatttacttctaaataaatttcaattataacttcaattaattaagctagtagaatgagttcaaagaattcaaatattaaaggataagatcctaagtctacccggacataaatatgttatagctacgtacggactctcgtcacatcgtacgtacgtagaacccacaactagttgcacataacaataaatatcacctatggggtagtttctcccttacaaggttagagaggagacttacctcgctccgaagttccaaaaccggctccaaggcttctttaacacctcaatccaaagcctgtcgatccaaaactattcaaataatgtgcaaaccaataaaaaggatactctaatatccataattaatcaatttaaacaaattcccaactccgctcaaaaagtctataaaattaaccctcgggcccacatgcccgaattccgaaaagttttgaaggtaaactttacccataataccacgaacttaaatatataacttattccaaatttcatgttcaatttcgtagtcaaactccaaaaatgccaaattctaggttttctaccaaaccccccacaatttttactaatttctatgtttaaatacttatacaaatcatgtatttaaattgtaataggtgggaatcacttaccttgtgttgcttgatgaaaatctccccttgaagctctccaaaatctccccaaccaagtgaaaaatggaagaaaaatgggccaagtcccgtttttataaaaatattactgcccaacgactttccgcacatgcggaccaccagcagcacctgcagaatttccatcgcaggtgcggttctaactcagtctaggaacgtcggcagctgcagactcaaatgcgcatctgcgcttcctcttctacggccaaggtgcgcttctgcgcccacgctcctgcggacaatgtccacttctgcgatcaacatgcctcctaggcctttccacttttgcgttccttcctccgcagaagagactctgcttttgcggtcgatccgtcgcaggtgcagctccgcttctgcggtccacctgctcgcttctgcgaccccagtcccaatcatgtctggccgcttctgtgaccctctcggttgcttctatggctccgcacctgcggtcaaaacctcgcaggtgcggttacacaagatatgctgccaccagcattttcttaaggccaaaatcaattttttaaccatctggaaacctcccgaggccctcgggacctcgactaaatataccaaccagtcctaaaacatcatacgaacttagtcgagactttaaatcacaccaaacaacatcaaaactatgaatcaacgatcaaaaccctcctttaaactttcaaacctttaaacttggacgaacacgtccgaaccatatcaaaacatccgggaatgaaaccaaactttacatgtaagtcaaaaatcacgatatgagcctattccaaggcctggaacttcgaacggacctcaagaacaccaaaattcattccaaatcaaacttaagaatttattaaacttccaaaaatgccaaccttccataataggcgccgaaatgctcccgatttcgaggtcatttactcaaaagtcaagccttagtgaattcttccaacttaaagcttccgaaattagaattttctttccaaatcagtcccgaacttcccgaaattcatttccgaccacacgtataagtcgtaatacctgaagtgaagctactcaaggcctcaaaccgccgaacgacgcgctagggctcaaaacgaccggtcgggtcgttacattctcccccacttaaacatacgttcatcctcgaacgtgctaaggattgatttggtgttgtccaaagtcactgtgccataccttgtacacctacccgtgctaccacattccagttaaacacgttagctcgaaccagactgaaaatcctccctataaccttagctaacaagctttagaaccaagttccaacattcgaatttctttacaaggcctgattctaacacgagaacaccgtaccaatgaccacacactgtaccaaaacacgatcatacatctatgctgaaatcacaccatgcaccacacaagtcggttgtccataataacatcccctgaccacaatagctgaagtttcacgaatccgatgtatgcaatacatatcatgacacatataaatcctgttccaaatctcgcaatactgccacgacaaaaaagacgtgtagaaactcataaccacctaccaaatcaataattcatggagcctctcctcctgacaagaaccattacctcattctgaactgaataacgatattttctctctaaggtaccttatataaatctaattccactaatttcaggtctactaatctcgtctcacccagtacaagccgctgaagcaataaactgcctcaaacactgactcagatgtcatatgacgccatcaatgtgccgataagctacaactcgaatatgacacataaggaggaatgaactcttgaaaagaattatccatcctgcataacgaataaaacggccgaacagatgttatgaacccttcttagaggatgagaaacaaaatatgcaggaatagatatagggaaccgtactcaacgtggcactgttgcggcgtgcaacccgatctaaacaatgtaaccatggcggcgtgccacccgatccactcataaccataaataaggacatacccatcaagacataaggcttctacctacagaataccgaatatcggccacaagcatgctaagtgcaaaaatacaactctagggagacggatagcgccatacgccacaaaacccaagcacgactaatgtgcgataaatgacctgcatctcgagagccatcctgctcccataacaccacaagctacacgggacctcaacacgtgtgcgaataatcaatccgtctcaatccgggacaaactcccacagttcacaaccaaaggactatggcgcctttcaggcataaactctcacatttgctatattaccataacctccatacttggttttaattctttctaaatcaaatgactaagccacacttatacaaatctccccgtggggtatgctcccactaccttttcgcccaggtagcaaaatccgcacctccataccaccaatcgtactaattctgtaaggaaaatcacaatccgcaactcaacacacaatgcctcttccacagaacaccattctcaagagacactaaaataatgccagcttactctaaacatctgaattcttccctgctcatccgagctcgtgacatccttttcaacaccgaaccgtaacctcgatcgtaaactttcaaattcccatgccgctcactgcacctatcatgccgctatgcgagaataatagaattcatcataacccctgaattaccagtagaataaaacttaattggatagaaacttttcacttagctcatttcctaagagcccatgcaacacgtaactaaattcccaaaccgcagaaaacacaacctcaaaccatgatctaaaccttcataactcttccggaaatcaatttacacaacaaagccatttgaatcaaatacctcccaaatcaattaggtcacgatgtctatcaagccctcacgtacaaccataaaacacatgtataacttcacacccgaagaaactaatcattgccacaatcataccgatttgaccattactaaccgacccaacttctttcaatttactcttgacctgacgtagaaatataattgctccattcacaacataacgaactcaaatcacactcaccccgagtgacccgaatcgcgataccacattgtctcaatactcatgaaccatctcataccctccttatgtgctcaatagaatgtccgactggtacacctattctgcaagaccttccgtgaatccgaagctatttattcctttcctccaatactacactgcatacccgaggataacatagaatattcccagtcccattcacaatccactttgaagactcgatccttaaccacacatcggacccgaaatccttaggcactgcactttaattcttgaacccactaggaccattgctgagagtcatccactctgacccggtcccgaatatgaccaaaatccaacactctacaagaacatgaacaccctatcgaaaaagcagccgactgaactcttttccttgtacatcacatccacaaaagcataggctacgagtcttcccaaaaacctgaaaatacatcgataaagccgaatatagcacacttccatcaagtattttgctgaattacccatgatatttcctttccttggacataaataatccgccaacgcaccgataaccagaaatcgcacaagcagacaaccacgcgatccaatcataaatggtggggctcccccacttagctttaagctaccatcacataatgcagagcccacaactattcctccttctcaattaccatgatctcgcaccgttaacccgccagacttcttgaagtcttttgttaagcttttcatgaacattttgaatcgccagtcacaatcacatattcaacctcttactgggtagcaagtaatattcttcacagaaccttcatcaccaccacacaaccgctaaccttctcacaggagataatccacttgtggaattccttaccgacatcttccaatgacgctgcactgggtacaactaccacgtaatcagtaaattctcctgagcccatgctcgcccaccagctgtataagtatgctccttccctattgaaatcaattgaaagttcaacaataccttccgaactcaagtcatattgcacctaaaatgataatcagatcatcacacccctcttcatttcaaataaactcctttacgtcatattcaatcttccttcgtatggtaaccatcactccaaataaaatttgtagaccaaatcaccttccatcacgattccctaaccgttctacactttctcaaggcatgcaactatccttccacagaatccatatgctaatctgccgcttttacttcggttagaccatctcctttaaacaacttctcaacctctgcttttcatacttgacctactagtacttcaatcaccgcgaaacacttcccgccatgtattccctcatactttgctgcccaaatgttgcatcaaatcaaaatgcatctttgtggcacctggaccaataaaatgttaccgactctaagcctctttgaagctcatctttttcgagccatcaacattagaaataccaattcgattctgaaccgctgcatacaactatctctggcaaccacccctcatgcaccatttcacaacaccctgccctgaaggtaaaatccaagaagaccgtaacaccggcgaaccataatgcattcaaacaaggacagcgacaccgcatcactatgaaaattcctccacactcaaaaatattaagtctcgttactttatcaaccaagcatggacatctattgtccgattgcctatccttcactagaattaaatgctgaaccactaaatcatgcgctgagaaatcctcctttcgagtcatccactgccgcgatcgatacataagcactctaccattataccaacacgatgcgataacaactcatgaacaccataacaatccatgcatagcctcaaaaccgtaggaagtacagatactgaactgaaacgagagaacacacttcctcaaggcgacgataatagcctgcctgaacacgcagggaaaatcatcatgcactacgcctgtagtatcaataccactactcgacatccatttgacaaccaacgcttcacgtcacataagattgagtaggaaggaaataaagccacaagactcaatggaatccaactgcatgatgagaaaatcaagaagagaagtactcctaacaattctgtagcctctcgaagataggtacagacgtctccataccgatacgcaagactctactagactttctcattactcgtgagacctaagtaaacctaatgctctgatactaagctatcacgacccaaaatccgttataggtcatgatggcgcctaacgccgccgtcaggaaagccaacaatgattcaataaattaattactcattttagtatcttgaaatcaaaattttccttaattgaatagtataatatagaatttacagagtgaataaaaatatttacatgaaccttaataatggataacctaaaggaactcccaaaatccggtgtcacaagtgcatgagcattttctaaaaagtacaataatattacaacatctgtcccgaatgtaataagacagaataaaataaataatacaatggagactcggtggactgcgatgcgtagcttggattgtaactcccatgaagtctccccaacaggtgtgcctacgcgccaaggtggttatcagtgaacttgtcagatcctgcacatttggtgcagaagtgcagcatgagtacgtaaatcaatgcgtacctagtaagtatctagcctaaccccgaagaagtagtgacgaggggtcgacatcgacacttactagaggtccaagcagataatataataatccataacaagtataaagtgcacaacaatagtgaagttaatcggtaaatctcaaaagttcccaattatttcctttaaaatatgaatttcttaaccttgtattctatatgaatttcttaaccttgtattctatcttaatatctccgaaagttgtcatgtgtcatcatcaaataaactcggagtatcatataaaataccgggcatccgtagggaggttaactcatgaatatttaggctacaagcgatacaacacacgattctgccgaggtcgttcggcccgatccagaataatgtgtacactgccaagggtcgagcgacacgaaccatagatgcatctatatactgccgaggtgttcagcccgatccaaaagaaaagggaagtctacccggacataaacatgctataactacatacggactctcatcacctcgtgcgtacgtagcacccaaaactagttgcacataacaataaatatcacctagggggtagttttccccttacaaggttagacaggagacgtaccccgctctgaagttccaaaaccggctccaaggcctctctaacacctcaatccaaagtccgtcgatccaaaaatattcaaataatatgcaaaccaatcaaaaggatactctaattcccacaattaatcaatttaaacaaattcccaactccgctcgaaaagtctataaaatcaaccctcgggcccatgtgccaggattctgaaaatatttgaaggtaaactttacccataacaccatgaactaaaatatataaattattccaaattccatgtctagattcgcggtcaaactccaaaaatgcgaaatctaggttttctaccaaaaatcccataatttctactaatttccatgtttaaatccttatacaaaccttgtatttaacttgtaataggtgggaatcacttaccttgtgttgcttgatgaaaatctccctttgaagctctccaaaatcgccccaacaaagtgaagaatgaaaataaatgggccaaatcccgtttttataaaaaccttactgcccagaggctttccgcacctgcgaaacaccaaccggacctgcgaaatttccatcgcaagtgcggttctaactcagtccaggcacgttcgcatctgcgcttccgcttctgcacccatgctcctacggaccatgtctgcttctgtgaccaacaggcctcccaggcctttccgcttttgcgttccttcctccgtataagcgactctgcttctacggtcgatccgccgtaggtgcggatccgcttctgcgatccacctgctcgcttctgcgaccccagtcccaatcacgtctggacgcttctacaatcctcttggccgtttctgcggctccgcacctacgaccaaaacctcgcaggtacggttacaccagatatgctgccaccagcattttcataaggccaaaattaatccggaaaccacccgaggacgtcggaacctcgaccaaatataccaaccagtcctaaaacatcatacgtacttagtcgagcctttaaatcataccaaacaatatcaaaactacggatcaatgatcaaaatcctcctttaaactttcaaacctttaaacatcgacgaacgcatctgaaccatatcaaaacatcccggaatgacgccaaactttacttgcaagtcaaaaatcactatacaaacctattccaaggctcaaaacttcgaacagacctcgaatacaccaaaattcattccaaatcaaacttaagaatttcttaaacttccaaaaatgccaaccttccataataggcgccgaaatgctcccggaccacccgacactcaacccgaacatacgcccaagtacgaaatcatcatacgaacctattggaatccttcaaatcccgatttcaaggtcgtttactcaaaagacaaatcttagttaattatttcaacttaaagcttccgaaactagaattttctttccaaatcaatcccaaacttcccgaaattcaattctgaccacacgtacaagtcgtaatacctgaagtgaagttattcaaggcctcaaattgccgaacaatgtgctagggctcaaaatgatcggtcgggtcgttataacaccacaacagaccagatgtggcttattatagcgcttgggctgaaggagcccctccggagtgtgcaccccccacagtgagcgcaaatgacattatatttgggatggatttcccagggcatggagttgccttatttatttatgtttgggatggacttcccaggacatggaattgccttgtttatttatttatatttaggatggacttcccagggcatggagttgccttatttgtttatttatatttgggatggagttccctaggctggattagccctgtacagtactgagtgactgaatgttagttattatgtatatatatttgggatggatcttctcagggctggattggccatatacagtactgagtgactgtgtgcaagttgtcatttatatttgggctagatctgtcttgtacagtgccgagtgactgagtgtgcagaatattgagcgtgatgagtgaaaatgcgagacaatgagattgagtactctgtgagtatgggtacataagttcatcattatgttgcatggtattagacatgcatacttgatatgtaggcataaagaagtattttttctcacgccatctgataatgagatttctaatttgtcgttaaagtttttgagaaaaatcacaggtttcaaacttactcataattttggtaacttttggcatttgagttttactgttatattaaaaagaaatgtttattttatccgaaattttatacgaactgagcattttattattgagttattacttttgttgctttaaattatattgttatgagatgttattagttattggagttggactctgatccttgtcccagctcatcactagttgcaacctaaggttaggtttgttatttattgagtacatagggtcggttgtactcatactacacttctgcaccttgcgtgcagaatttggacgttgatgctgttatacatggcgagagctggcattggagatgtaactgcgttccggtcatagttgcctcttgaacttggtagctttagattaaaaaatctgttcatgtattttcaaacagatgatgtattttatttcacaccagctttgtaaattctgaatcttagaagctcatgatttgtactactagtccttgaggagtgtattatagtcagttaaatattaattgaatcagatatttgtaaattggcttacataacgggttaggttaggtgccatcacggctagttgaattttgggtcgtgacaagttggtatcagagctctaggttcataggttctacaagtgatgagcaagtgtctattagagtgttgaggatcggtatgatgacatccatacttatcttggagaggttacatagcatttaggataaacttcccatctttctttccttatcgtgtggaattgattcagcttgaaacataactctttgaattcctcccacgcattcgtgtgcgcatgtgagcgctcggtatcaattgtgtatcgccgacttgtgattccatgaacgaggttcaagatgagtattctgtgttttggtgatggttcagtctggaggacttgaggccagggttagaccgcggcttaagctcggtagcttcagttgtaatttgtacatttggacttatatatctggtagtgttcctatgggtggaatttgtggctcgataagcggtggaatgactgaataatgagtatgatgcgattgtgggatgagttcagatggtttgaatgtgacgcgaagagtttctcgagatgtaaaaagggacattgggtgcttgatttccgtcgtgatttgatatatagtctcgagttatgagtgtgttgaaggatctttcacgttgttaaattgtgggacaaattaaattctcatatcttgttaatgagtttacactcgggaagttaagtgatcgcgtagtgattgtggctgggaaagggtatatcaagatgccaattttaggctaagcatgtgggttatctcatgcagagtaatctacggaggtgtgctccttataatattgagtcgatttcctttctaccagcggggtgtacgtgctgagatttgaatttgaatctggttgaaaaagttgacttgactgtcaagaaaaataaatacgagcttagcgtataattgaggtattttatagttggggttggatgagcttgtgaagaatttagttgaatctcactgcagtatcatgacagtaatacggtatggggattgtgagttattgaatgtcgtggtctatagctttgagccaagtgggggagcctgttattgatggtttgatttcatggttatatgttaaattttagttttggtctgagacctacttgtggattagttatgacttgcagaggttgagatcgaggatgactcgagtaaggaaattcatgaatattagttatattgcactttatgagtatatgaacatcatgtgatgagtgagttgttatttatgaagtatgtagtgcgcacggagtatgaatttgatcgatggtattaaagcagggttacttctttgagtgttgttgtgctaatggggcatatgcttttggcccatttgggcggaataatttagatttgagcagaatggatgactctcgagaaggatctagtggattcaagaattatatatagcaattgagaatttttcaggatttgtatatggctagggtgtcgagactcacggtatttctatatcattatggattttacatttcggtatcagaaaggtggaggaaacgacttcagattcacataaggtctttttagagtgggtgtctcggttgtggtatttgtgagggataattatgatgtagtgaggctttacagatattttggtggcaatatttttgggtttggtgacctgcgtggcttagtcgagttagaggaattcagttctgatagcttggttatgtgcaaatgaattttaaagtgttcttgatggtttctaccattgtttgaatcggatattttctaccggtatgggaaacgtgttatgtatggtgattccctcctggaaggaagcaagaggaaggtctctaattgatcgagtatataatttgctggttacctagagttgataatgagattcttgtgcttgtcacatgatggcatgatagatgtggtgtgttatgcgggattaagatttacatgtacaaggtggcagttcattctttaagggaaggtcatgaattctggacagaatggtcagtttcagatatttagatgaatattataactgctcggtaatccctgaaaagggtgcgcattttagaaggcgcattgtgttttgatttacgaatgttcatcggtattgcggtactcacatggttgatagactgcggatattccaattattgctatatggcacggaagaattatggaagtattcctcgtgggatgattgtgcatgaaagatgtgttagtcattcgagtgctggagttgggacgagttacggtgattcatgtgttctatgtttttggagactaggagttcttagaagcatatcgtttcagggttgcggcctgtttgaggtgagcattttatttaaactcagtggaggcactcgttgcgttaatttcttgtgatagctaagcgctatgagtgcgtatatatgtgagatttgagcccatgtgcgggcattggggcaaatattcatactcgaaagaatgcttaggctatgatatgcctagagttaactgttaagtgtaaagttataacgtttctcgtattcgtacctttgttgagcactatctgggctatacttgaggttacaaagaggctaattccctgaataaactgggtagttactatttttgcgttaacttgccaaattgatttgtgatagcacgctttgcacatgcctactctatggcgtgttatttataccattccagcagcatgtgaatcttatttcatttatcatatacctgtatacttatttgattgctcttgtatgatatgcttggactagaagcctgtgactatgccaggcggattatgttattggcatgtgagttgtccgtgcagttgatgttaatgtgagctctaggggagctggttaccgttattagattcgtgtgtcttggttctactatatatgatgagctcatagcattgcggttgtggtggtgcttgttgaacctgcaatacggttctcttctttgagacatttcccatttttgggtacatggattgtgcagctgtggcttgagttatattggtgtggcatatatgtgggatagttgtgtttaataatataaggtcattggacctagaatgggtactatcaggtttgattacggtatattcaggaggatagtattgaaagtcggcttagaaagtgattatggttctggttggggcgagagagctccatgacttgttgatctgataaggggtcatgagattccatgcttttattatcatcagtaatgtatgaaggttttggaatgaggttttgtttgatatggggtttaatactagtaccgggttggttttgagtagttactatgatcgggaatggtgttgcgagtatgcgagttgtgtagtatgttatgtgattatatctaggattatggttatggcttgatacagcttgttcaaacttatacagtgtgtagatgtgagactcgggtcttgtgagaaattctggatgttggaaattgggttctaagttttacggactgaggttaaagtaatgatcttcaattatgttgtgttatcaggcctatatggaatagagtggcgtgggatcactcctgggtatgtgcgtggtaaggtggaacagtgatttaagggcttaggaacaactcttggaacattcgaggatgaacgtatgtttaagtgggggagaatgtaacgatccgacttgtcgttttgaacatttacactcctttcaactatttgaagtcttgagtagcttcatgtgatctattatgaccagtgtgtattgtcggctttcgttttcggatgattcgggattaaattgaaagaataatccttgcttagaagcttaaatgcaaagggttgatcggagtttgacttttgtgtaaatgactgcggaatggagttttgatggttccaatagctctgtatggtaattttggacttaggagtgtgtctggatatttattttgaagtccgtagttgaatttggcttgaaatggcgaaaataagaaattgaaggtttgaaagtttgaccggaagttgacttttatgatatcgagttcgaattgtgatttcggaaatttcagtaactttgttatgtcatttatgacttgtacgcaaaatttgagctcattccggattgatttgatatgtttcggcgcgaaatttgaaagttgaaagatttaaagttcattaagtttggattgaggtgcgattcgtcgtttcgacgtcgtttcttcaagcataagtagtatcatattaagcaaatgagctacaaattcagtgttgtttgaagcattagatccgtattgaaataacggagccatagcaaaaagaatcgtcgaattcagacatcgtatgagagagttatgccaatttccgtagaaatagaaaagatttctcatcaccaccgcccagggtagcgtggggcgctagccctggcgctgggatttttgaggttctggaaactaggccacatgtacctatggcgctcaaacattaatccctataaacgggggatttctccatttttgacataaacagagttggggaactcggtttgggcgattttcagaggcaaatttcgccacataacttggggtaagtgttcttgactcccttgttattatatttcatgaattaatcttcgttttcggcattagattattgatttttcaagagaaatcgtaggaattttctacaattccataaaacaaattttctagctttgaacaccgattcttagtcggatttgaatgaaattagtatggttggactcgtaattgaatgggttatcggattttgtgagtttcatcgggttctgagatatggaacccactgttgatgttttagttgaatttggtatttttattagaaaatttagcattttcatatggaattgattcctacacctcgtgttgattgtatcgaattaattgtaactagatacgaggtattcagaggccaattcgcgaggcaaaggcctattggaataaagaattgcacggtttgaggaaagtaacatttctaaactttgatctgagggtataaaccccgaaaatacatgttatatgattttttttgggtgtgacgcaaatgctaggtgacggacgtgtgggtgtgcaccatagaaacagtgacgtaattgattctgtggaattgtgtagtcaaataatcttggcattgtccatgtactttaatgtgttatggaaatcgagctgagaatcatgttaaaaaatcatgctgaggctatatgccggtattattgagccccacagaggtcatgttgctgttgaattatttgattaaattgtaattttgtactcagtcatatacattcattgcatatcatatctcagtctctgttgttatttattgatatatcatatcatcattttgggctagtttcatnnnnnnnnnnnnnnnnnnnnnnnnnnnnnnnnnnnnnnnnnnnnnnnnnnnnnnnnnnnnnnnnnnnnnnnnnnnnnnnnnnnnnnnnnnnnnnnnnnnnnnnnnnnnnnnnnnnnnnnnnnnnnnnnnnnnnnnnnnnnnnnnnnnnnnnnnnnnnnnnnnnnnnnnnnnnnnnnnnnnnnnnnnnnnnnnnnnnnnnnnnnnnnnnnnnnnnnnnnnnnnnnnnnnnnnnnnnnnnnnnnnnnnnnnnnnnnnnnnnnnnnnnnnnnnnnnnnnnnnnnnnnnnnnnnnnnnnnnnnnnnnnnnnnnnnnnnnnnnnnnnnnnnnnnnnnnnnnnnnnnnnnnnnnnnnnnnnnnnnnnnnnnnnnnnnnnnnnnnnnnnnnnnnnnnnnnnnnnnnnnnnnnnnnnnnnnnnnnnnnnnnnnnnnnnnnnnnnnnnnnnnnnnnnnnnnnnnnnnnnnnnnnnnnnnnnnnnnnnnnnnnnnnnnnnnnnnnnnnnnnnnnnnnnnnnnnnnnnnnnnnnnnnnnnnnnnnnnnnnnnnnnnnnnnnnnnnnnnnnnnnnnnnnnnnnnnnnnnnnnnnnnnnnnnnnnnnnnnnnnnnnnnnnnnnnnnnnnnnnnnnnnnnnnnnnnnnnnnnnnnnnnnnnnnnnnnnnnnnnnnnnnnnnnnnnnnnnnnnnnnnnnnnnnnnnnnnnnnnnnnnnnnnnnnnnnnnnnnnnnnnnnnnnnnnnnnnnnnnnnnnnnnnnnnnnnnnnnnnnnnnnnnnnnnnnnnnnnnnnnnnnnnnnnnnnnnnnnnnnnnnnnnnnnnnnnnnnnnnnnnnnnnnnnnnnnnnnnnnnnnnnnnnnnnnnnnnnnnnnnnnnnnnnnnnnnnnnnnnnnnnnnnnnnnnnnnnnnnnnnnnnnnnnnnnnnnnnnnnnnnnnnnnnnnnnnnnnnnnnnnnnnnnnnnnnnnnnnnnnnnnnnnnnnnnnnnnnnnnnnnnnnnnnnnnnnnnnnnnnnnnntattataagcccgagagactgagagattgatgactgagtgaggccgagggcttgattgtgaggataattatggaatcgggctgcacgccacaacagaccatattggctttatatattttattattatatggatcgggctgtacgccgcagcatgccttatatgctttattattgtgggatcaggctgcatgccgtagcaggccaaattggctttttatagcgcttgggctgaatgagcccatccagagtgtgcacccccccacagtgagcgcaaatgacattatatttgggatgtatttcctagggcatgtagttgccttatttatttatgtttgggatggacttcccaggacatggagttgccttatttatttatttatttatttaggtttgggatggacttcccagggtatagagttgccttatttgtttatttatatttgggatggagttccctggactggattggtcctgtacaatactgagtggctgaatgtcagttattatgtatatatatatttgggatggatctttcctgggctggattggccatatacagtactaagtgactatgtgcaagttgtcatttatatttgggctggatctgtcctgtacagtgccgagtgactaagtgtggagaatattgagcgtgatgagtgaaaatgcaagacagtgagattgagtactctgtaagtgtgagtacatgagttcatcattgtgcggcattgcattagacatgaatacttgatatgtaggcatagagaagtatttttcctcatgctatttgataatgagatttcttatctgtcgttaaagtttttgaaaaaaatcacaggtttcagacttactcatattttcggtgactttcggcaaaagatttgagttttactgttatattaaaaagaatgtttatttttttctggaattttatacgagctgagcattttattattgagttattacttgtgttgctttaaattgtattgttatgagatgctattagttattggagttggactctgatccttgtcccagctcgtcactactttcaacctaaggttaggtttgttacttattgactacatggggtcagttgtactcatactacacttctgtaccttgcgtgcagattttggacgttgatgctgctgtacatggcgagagctggcattggagatgtacttgcgttccggtcatagttgcctcttgaacttggtagctttagatttaaaaatttgttcatgtattttcaaacagatgatgtattttatttcacaccagctttgtaaattttgaatcatagaagctcataatttgtactaccagtccttgaggagtgtattagagtcagttaaatattaattaaatcggatatttgtaaattgacttacctaatgggttgagttaggtgccatcacggctagttggattttgggtcgtgacatctactccctactatttcttcccctctaacggttactttatagtgattagcgactaatgtttttcccaattttgctcaatgagcctatctattaacattttcggaccacccatccccaaaattctaatgccaccggaccccaacattaacagagatgcctcctcatctaaacattttccacctttgcaaagaagagcaatggaaacaacacaatacccaagcaatcgcagctagaatcttatgtaggagctcatggctacaaagttggaaatcgaacaggactaaaagtaagaatacccccaagagcacatgaagtgattgaaggcaaagcggtggttgttcttatcaaggaagaacatgaactccacatgctggtggaccatcatcggtaagtttcttcgaggcaaacctgccattgacaaaattagggttgattttgctcgattatttatctctaaaggagaaattaaaatttgtgcaaaagataaataccatgttttcatagatgttgaaaatgaagatgacttcaataacatttactcaaaggagtttattaatctctcgaaaaatatcagcatgaagattctgaaatggacagccaattttaagcctaacactgaaacatccctggcccctgacgggattaatctcccgaatgtaccttggcattactatgaatgggataccctatgcaggatatttggttccataggtaccccattggtcatggacggagttccccattggtcatggatggagttacaacaacaaaatctaggccaaccacaacaaaattgagagttcagattgatcttgccaagctctttttatctatagtaatagttgaagtaaaaaaccaacacggcaaaatgaaagcctttgactagaaaattgaatatgagtccatgcttgcctattgctctcacctcaaggcacaaggacactctattgaaatatgaaaattctcacaacttgctcaacaaaagaaaagaggtcaaacctccactactggaaaatggctgaattacgaccgtcaaaacggtcggaaatcacgaatttccgactattttccgatcaaaattggtcggtcgaaaaatagttgtcgaaaaacagcttccgacagaatccgtcggtgatttccgaccaaagtagtcggaaccttcaaaaggtcagacgaccaaattattttcaaatttccgaccaaagtggtcgaaattttacctaccgaatcagtcgtaataatataaataaaaataaatattaatttaaaattaaataataaaaatatataatttccgaccgaatcagtcggaaattaatcatttaaaaataaaatttatttaatatttgaatgaatccgttgaaaactgttaaaaattaattaatgatttttaatttccgatcgattcggtcggaaatctggatatttttggaaaaaattgggcagctgtccgaccgttttcgtcgaaaatcagtcggaagtttctgtaaaactgggcagaattctgctcaattttgagctacaccacctgccaaacaattacaatacaataacaccaataaccaatcaacaaatatatcatctaatccaaacaaatccaaccattaacacaatctaaaccaataaatccattaaacctaacaattttgagcataaaaatatccaaatagtagcccacattcaagtttaaaataaaacataaagttgtctctcacaatcaagtttatcaatcaaccagaacactacacctacactactacacatcacattcagtttgttcatcctcaccatcagatagatcatgccatgttttctcataaatttctacatcttaacaaatgttccgaattaggagtccaactgttgcttcaaatcacgaatttcttttttcatatcttccatctgttcttgattttgagaagaagaagaattggctaagagtgggtttggatgacctgtaggtcgacgtactccaagtccgtagactctgcctttgtttactcctgtcgctgcctctgtccataatgaagccatatcatcaggtgttggttgagttgaagtaggctgagtttgttgtcattcttccacccttttatgattatcttcctgaaatgaaaacataactattatgtaaacaaactaatattaataaaccataaataattatgaagttagtattttacatatgtgtctgacgcacccatttccacccagtgttctcttgtaccatccttcttctttttcttatgcgtctcctcgaagacctcagcgtgaatcatatctcgcactctttccttttccttcataacaaaaagtatgagttaggcattacaatcataaagttctatatgtaaaacgaagaaaaattttataagtaattaccaatcttagtttatgggccgcaaaactaatcgaacctcatgtgtgcaacgagccacctttattggaggcacgattttcctttgcttgttcactcttcttctttcattcttcggtattccatttctaaagaagtttatcccaaacatcttctcttaaccacccaggcattttaccagcatttcgagcagcgaacagagtatctttaatccgcttagcaaccttcttctagaaaatattatttatttcattttgatgttgaggatgccatgtacactttgtctgcaatataaaaaattaatattatatgaagacgataattattaaataaatataattaatttttaccctaaattgattccacatttgctatatgatgttgtacggtatctgtctccaagatatccacggctcatgataaatggcttcctagaatccacaaccaaatgtgtagattggaaggatggcaaaaacctgtattaaagttaacatatataattaataaatatcttaaagtttaaaaagttttaattataaataaatattccttaatgttaacatatctaaaagtacattcaaaacttaaaaaatagtatcagaaccttcttacctattctcgtaggggacgattatcaatcgattataactatcatattgtatgtcccctccaagattatgcctgtgtctactagatgatgtagaagcatcaccagatgtaactgggtgagagcctccaatatccaacctagatatgctgggaatggatgatgatgatggagaggaagatgatggagcaacaaaagacgaaccatcatgctgactaccatgaaagcttggggatgcagcagctggtgggctaccatgctgactaccatgaaagctcgggggtgcaacaactggtgagccagtatgctgactaccataaaagctcgggggtgcagcagctggtgagccaccatgctaactaccatgaaaccccactaaagaagaaggtgtgggtacaaagttaaaaatagtattactttgacttcctttggcaggcatagaataatactgaactaaattattagatggaggggtggatagtgaacatggtaaatggcaatgaagtcgattgaggaggatgaggaagaggatggcgaggaagaggaggactcatatttggcatacttgaggtagttggaacaaattattttttcttcttagatttcatcttttccttccccttagatgccatatctgtaatataatcataataaaatacaaaacaaaaaatacannnnnnnnnnnnnnnnnnnnnnnnnnnnnnnnnnnnnnnnnnnnnnnnnnnnnnnnnnnnnnnnnnnnnnnnnnnnnnnnnnnnnnnnnnnnnnnnnnnnnnnnnnnnnnnnnnnnnnnnnnnnnnnnnagtaaatacaaaataattattctacaaattaaatgactaaataaataaataaacaacctaataagtcataaaaatataaaataattttgcaacataatagataattaaaggaataacataaaaaccccaacatgtcataaaaaacatacaataattcttcaaatatattaaatgattgaaggaagaacaacataaaaaggaataacaagtcaatcctcatcgctatcttcatagtaatcatctaagtcttcattatcgcctgcttcactttcatctagtatttcttcctcatcacttgtttcatgttcaacacctctatcttcgtcctcattttaaggatcaaattcttcatatatcccttcattatgctgcaattcatctgctaattcatcatccactattgattcaacattttaaatgtcattctgatacgccacatctaatgcatcttcgacttccactctactcacagactttattttcaaaactacccgccatgcagacttattcttactcaaaggataaggagcataatacacttgtttcaccttttttgcaatgataaagggatcggtattgccccatgtgtttaattttaactattttgtactgagtgtgcacctttgtacctttattcggtgttggatcataccatttacattgaaagagtaccaactttttcttcggccaacctacagtatactctaattccaaaatctcttgaagcacgccataataatcaacatctccatcacctttcactcacaccccactattgttggttttcattctattagaccattcttgtgtatgaaacttgtacccattgaccaagtatttatacatcattctgactctagagttaggtccccaagctatatcacgtaaaaatgggccattaatgccattagctggatcatgaacctctctctctctctctctctctctctctnnnnnnnnnnnnnnnnnnnnnnnnnnnnnnnnnnnnnnnnnnnnnnnnnnnnnnnnnnnnnnnnnnnnnnnnnnnnnnnnnnnnnnnnnnnnnnnnnnnnnnnnnnnnnnnnnnnnnnnnnnnnnnnnnnnnnnnnnnnnnnnnnnnnnnnnnnnnnnnnnnnnnnnnnnnnnnnnnnnnnnnnnnnnnnnnnnnnnnnnnnnnnnnnnnnnnnnnnnnnnnnnnnnnnnnnnnnnnnnnnnnnnnnnnnnnnnnnnnnnnnnnnnnnnnnnnnnnnnnnnnnnnnnnnnnnnnnnnnnnnnnnnnnnnnnnnnnnnnnnnnnnnnnnnnnnnnnnnnnnnnnnnnnnnnnnnnnnnnnnnnnnnnnnnnnnnnnnnnnnnnnnnnnnnnnnnnnnnnnnnnnnnnnnnnnnnnnnnnnnnnnnnnnnnnnnnnnnnnnnnnnnnnnnnnnnnnnnnnnnnnnnnnnnnnnnnnnnnnnnnnnnnnnnnnnnnnnnnnnnnnnnnnnnnnnnnnnnnnnnnnnnnnnnnnnnnnnnnnnnnnnnnnnnnnnnnnnnnnnnnnnnnnnnnnnnnnnnnnnnnnnnnnnnnnnnnnnnnnnnnnnnnnnnnnnnnnnnnnnnnnnnnnnnnnnnnnnnnnnnnnnnnnnnnnnnnnnnnnnnnnnnnnnnnnnnnnnnnnnnnnnnnnnnnnnnnnnnnnnnnnnnnnnnnnnnnnnnnnnnnnnnnnnnnnnnnnnnnnnnnnnnnnnnnnnnnnnnnnnnnnnnnnnnnnnnnnnnnnnnnnnnnnnnnnnnnnnnnnnnnnnnnnnnnnnnnnnnnnnnnnnnnnnnnnnnnnnnnnnnnnnnnnnnnnnnnnnnnnnnnnnnnnnnnnnnnnnnnnnnnnnnnnnnnnnnnnnnnnnnnnnnnnnnnnnnnnnnnnnnnnnnnnnnnnnnngtaacgatccgacctgttgttttgagctctagcgcgtcattcagcggtttgaaaccctgagtagcttcacttcaggtattatgacttgtgcgtatggtcggaattgaattttaggaagttcagagttagtttgggaagaaaattctaattttgaaagctttaagttggaagaattgactaagatttgactttttaagtaaacaacctcggaatcgggattggaaggttccaacaggttcgtatgatgattttggacttgggcgtatgtccggattgggttttggatgacccaggagcatttcagcgcctattatggaagttggcatttctggaagaatttcctaaatttgggttgaagtgcatttcaatgttattgatgtccgtttgggatttcgagtttggaaatagctccgtaaggtgattttagtattgggagcgcatctaggtatggatttggaggtccgtaggtcattttagggttatttggcgaaagttagaaatttgaaagtttttgagaagtttgaccgggagtggactttttgatatcggggtcggattccaattccggaagcttaagtaggtccgtaatgtcaattatgacttgtgtgcaaaatttgaggtcaatcgaacgtgatttgataggtttcggcatcgaaggtagaagtttgaagttctaaagttcattaagcttgaannnnnnnnnnnnnnnnnnnnnnnnnnnnnnnnnnnnnnnnnnnnnnnnnnnnnnnnnnnnnnnnnnnnnnnnnnnnnnnntttgatgttgtttgatgtgatttgaggcctcgatcaggtccgtgttatgttattggactgattggtgggatcagacggggtttcgggggcctcgggtgagtttcaaatacttaacggatcgatttttggactaagaaaaatgctaaggcagctggtatctggtgtaaccgcacctgcgaggttttggccgcaggtgcggagccgcataaatggctaggagggtcgtagaagcggttttgggtgagctgggcagtgcctgcaggtgcgagacttttccgcttctgcgatggcgcagatgcggcctcttggagcgcataagcagagtggagcgcaggagcgaggtgcatttgcgcacctgtgatgtcacaggagcgggacattgtccgcaggtgcgaaggggaggccttcagtgttttatgcagaagcggtcttgatgcgccagaagcgacgctgcagaagcggcctttggcttcgcaggtgcgaaagtcgcctgggcagaatgtataagttagccaaatcgggttttggctcatttcacctcttttctctcgttggagccggtcttgggtgcgatttagaagttccattttgtcatccttcatgaggtaaatgatttctactagttgtgagttacatataaggtttatacacggatatatgcatgaaaatttgtagaaatttaagattttgaaaaaaaaacctagaaattggtatttttagattttatccacgaaattggacatggaataaattatatattagagttcgtggtgtcatgggtaaagtttattttcaaaacgttcggaatccgggcacgtgggcccgagggttgctttatcgatttttttagcggagttaaaaattgttataaattgattaattatgggtattagagtatattttgattgggttgcgtcttatttgactagtttttgatcggcggtcactggtttgaggtattagggcggcgttggagccggttttggaacgtcggagtgaggtaaatctcctttctaaccttgtgagagggaattaatccaatatgtgaaataattcaatatgtgcttctatttgtgggggctacgtacgcacgaggtgacgagagtccgtgcgtagctactaatatacttatgtccgtgtagtctaggacccagatcatgttataattgcgatgcttgcatcctacttgttaatttaaattgcttaaatcatatcgaaacttggttactccattcttcttgactgtaaatgagaatttgtatttcttgaatagttgccttaataaaacttgaatttggttgttttaaattgtattttctcttttgtggagcgggccgaacgcctcggcagattaaatagatgcatttatggttcgcgtcgttcgaccctcggcagtgcacaatttaaatatttatgttggagcgggccgtacgacctcagcatgatttgcgcatgatatatctttggaattgataataattgatattgatttcattggccagaggtccaaaaaaaatgttaaatgacgaaaataaatttgaaaatttcttattaacaaaagaattgtttacttatttcatgatattgagcttacaaccgttctacgtaatccacgcttagttatatcattgatattttatttatagcccatagtaagtgtcgaagtcgacctctcgtcactacttcttcgaggttaggcgggatacttactaggtacgtgttgatttacgtactcatacaacacgtgctgcacatttttgtgcaggtacatatatgtctagtggccttgtgggcgcagaggcgcggttattgcgtggacttaggtgagctgcattctatactacgatccgcagccagcagagtctccttcagagtatttatattttccctatcccaatttgtatttcggacagatgttgtattttaatttacattcctagtttagtctcatgcactggtgacaccggattttggggtggttatgggttgtccggtattgaagttgttaaaaatattattatttattttgtaaatttcatcttttactatttaattgaaggaaatatgattttagaaatattaaaatgagaaccaaatttagtatttatttttggcttgcctgacagcggtgtccagtgccatcacgacctttaatgaattttgggtcgtgacaaatactttcaaattctttaaaccactctgaaaacttgggataaacaacatctttcccatatatacccacaaagtaactgccattataacttttattagttaaagcactggtagatctaatataaaagttcgcaatatataagaatatatacttacctataataaggttggacctcagtgcaattcaacaatacatgtgttgtagctgactttagctccatctcagacaaccttcgttttggactatttttttgacctcttttacctgattgattaaaaatgaaaaagggtggcacatcatgtcgatttggtctttttctcaaacatggcacatcatgttcaaaatagtatgaagagaaataagatatttctttagccacatattcctcgcatatcgaaccctcaattcttgatctagtttttatgctccgtttatatttgtcaatagtcctgcatagtgttatttttagacgaaacaatctttaaagcaaataaaaaaggtaaatgattaaatgtcattacttctcgaagggatacatccatctacattgaactggccttccaagtcgtgtctcttgtgcaaggtgaattagaagatgttccattacatcaaaaaaaccaagagggaatttttttgccagcttgtttaaagttaagataatgttactctccatataaattatgttctctaccctcaatgtgctagaacacaaatccttaaaaaagcaacttatctctgtaatcagtttccgtattcgatttgaacgcaataggcatcaatgcttccatgaaaatatgacaatcgtggcttttcattgacgccaacttcccttctttcatgtcaacacacctggataatttgatgcgtacccatcaggcatcctcaaattgttaacccaactacaaatctctcttctctcatgcaaggtgaacgtgtaactggctttgggcttctgaatcttattgttaaagtatgtcagataaaactcacttcgcctacaatattcctttatgtccatcatggccttcatgttatctttggtcttggtagtaacattcataacagtgttaaacaaattgtcaaaagaattcttctctatatgcgtggcgtccagattatgccgaagaagattgtgctttcaataaggtaattcccaaaatatgctctatttagtccagttatgtgtgacaccataacctggtatcttagatggtggagattctgttactttaggcagatcccttactctgttccaaatttcttctgaacacaagcaggccggtggctcctcaaaatcagttcggttcttcataaatgcatttgtatttcgcctaaattcatgattcataggcaagaatctacggtggcagtggaaccatgtatttttacctccatgtttcaaagtaaatgcttttttgtcttccatacaacaagggcaagctaactttcaagcagtcgaccacccagacaatattccacaagcagaaaaatcatttatagtccacatcaaaatattatgcaatctgaagttttgcttagttgatatatcatatgtttccacaccttgatgccataataattataactcatcaatcaaaggctgcaagtatacattaatcaaacttttcggatcgcgtggacctgggacaatacaagttaggaacagatatggacttgttatacacaactcggacggaagattatacggggtaacaaacactggccaacatgaatatggtgcagcagagacagaaaatggagtaaatccatctgtgataatcccaaccttatgtttcttggttcactagcaaactcggggaaaaccctatcaaaatgcttccactttctccatctgacggatggcatagaatactgggtggccttctatgttcatagtgtcatctcatatgaggaccaaagctcattgatacatacaacctctttaacctaggtataacaggtaagtaatgcatcactttaacttgaactttcttttttgtattggtatttgtgacttccttaaaacgaggctgattacaaaatttacagttttctagagatgtgtcatccttataaaataacatgcaatctttctcataataatcaattctctctgatgaaagacccaacttagaaaccaatttattagcagtgtaaaaatcttttggtaagtcaatgttactcggattaagttcattcataagcccaataatagaatccatgtcgcccacttgggaaatagaactatccgatttaatacctagcaatctaaccacaacaaacaacttggaaagcactgagccttcatacaatggacgactagcttcctctaactgttcatagaaacgcttagcctcatcatttggttcggattagaccccaggaaacatcccaaaagcatccctcatcatttcattgtatggagaattttacacattatgctctgcaatggggctaccctcaccaccaaaagaattatgaaagttaacagcatctaaaataacatgattctccccgtgaacagtctatatataataattttctacaaaccctttcttgtagagatgaactttaacttcgtctgttttcaataaattaacatacttacatttcacacaagggtgcctaatccttcctccaataggaaaattatcaagtgtttgagccttagcaataaattcagcaaccccttcaataaattcatccctcaagcccgcacgattaggatgcttcctattatacatccatctacgatgcaaaaattccatctacacaaataaaaatctagaaatgagatatttaaaataatttgatttattttaactggttacaaagttatactctttcaaaggtccgttttagatatatacgtatcattatgtcaaagcactttaattgatatattttattttttaaattaattttttttaacaatcgaaatctcacattaatccctattctaaataataaaagactttaactataataattaaatttgaatagcttcttaaatattcatataatccaaattaactaacgatttctcaaatttacaaattaatcttaatattgaaattgaaaaactttaaatttaatatcattctaatagtaaaactaacaagaaacaatgaacctagtacacaaactttacaccaaagctttaaactataactagttaatataattaccgttggaagtgaaagtgaaagttcatttttcttgtttcctatcattgttttctcaattactttttgccaacatgtcatttttttttatttcgagaataagtgaatcaatcactaaaattagatttaggatttcttaacatattcttgtttaacccaaaatttcaaccatacctaattcaacatattcttctctctttttgttttatattaagtatcattaaaaactaaaatccctaaaatttaaactatacctaattaaactatctaggatgttcatatatagaaaattgctacaaatttaacaataaaaataagatatatatgtcaacgaagtacttacctcgacgaaaaaaatgccggaaaagaaatgtgatgctgccgccgcgcgcggaaccattgctgaaaatggacaaaacaaaatttaaaaattaaggggaaaagggaggaggaaggagagggagaagggtggaggaaacgagagagagagagagagagagagagagagagagagagagagagagagagagagagagagcgaaaatacattacctataacgaggagtatggtgaagaaggacgagagggagagaggaggaggatgagagaagaaggaggaagaaaagaagtatttctgtttttggggaacggggatcggtaggattttaaaaaataattccgatcgattcggtcggaattttcattttaaatatttttttttaaaaaaacaaccaaccgaattggtcggaattgaagtcaaacgagtcaaactgacttttgcaccaaacatttcgaccgatttggttggaaatatggtcaaaaaaatttaaaattgtacagttgatatttttttgacaattccgacggattccgtcggaaatttctgacaatatttttcagtcggaaatttcaatttttctagtagtgatgaaaaggaaggagctactacacaaaccaaccatagtagcaatagaagacatgccaacctagataccaatatgcaaaggaacactacagaaaaacaaataccagatcgaaccagctacatgaagaaagaaaaagcccttaaaccaacaactttgaaggatggcagaatgtgaaaagaaaaaggggaaaaggaaatggaaatattatggcacaaaatggcaaaatcaggacaacaataatgataggaatactataccacagtctatagatcctaccttcaaggaaaatacacacaccaaaggaaaccaacaaataagagaaaccaacaattcattcagcatacttcaagcagaagatgggaaagaggaaatggacactacatcatgcctcaatgataatgacaaagattagtacactacaaaatccgttcagcatcagtcaagaagcacaagatggaacaaagcccaaataaaatattaaataaaaaataacaaacaaggctaaatgttagttgaacaaggagtggaaatgccaccaacaccaacatgagtgacactgaactacaagggaaaatgctcagcttggatatcattgacccataagatatcaatctctcacacaacaagaagaaaatatattataaacaagtagccattcctgaggaggttacacgtcaaggagaggcaagaaaaatcaatggtaacataaaaaataaggagattgatcaaactatcaactggccaacactcaaccttaaataagttactcaggaaaggtccattatcattgaggaagatgggagggaagtttgatatccaagctcatctagtaggaagagtgaccaagattttaccctcaacaaggatcttgaaccaccttattattgtgaacaaggagaaaggccaagggaggagtttaaagaagtttttcaagatatagacaacatgaaaacagaaatagacatagcctatagaaaggagagccaactatccaattcagatgatgaacccagcggtgacatcaactcaaaataccatgatactctcaacaataaaagtaaatgagtacaatagaatatcatcctcttcaataatttatctcctagaaaatgtcagatccctggtggtggttttgtccaaatacataaaagagcagaagagaacaaggaagagcaaatggaacctacctctaatgttcctaatgataaataaaatttcatgaaacttaaggatgattgtttctaaagaatctctagagagactccaaaccatcaaacaataattcaaattcctttaatctgtttacaggaacctatggtggacaataggaaaatggaaaaattcagaagaagacttggtatgcagcagggcttctataactgctcaaataagatctggatcctctagacaaaagaagtggatattactattattcaagacaaagggcaacatgtactgatcaatgttgcttacaataatagccctcctatctatattatagtgatgtacgctaaatgtactaaaaacagagaagagagctatggcaggatcttaaagatatgactaacaacatacaaggcccctgggaaaaattgaagactttaatattatcacttttaataaaaaacaagaaaggtggacgaagccttagaatagacgagaaccaagatttcattgagtgacttaatgagtatgggcttcaggatgcaagctttacaagttctatgtacacatagtgtgacaacagagaccaaccaactaccatctagaacagacttgatagacttatttacaacactacttagtttgactctatcaataacatctcagcaactcatttgtccagagcttgttcagaccatgcacctttactagttaaaatgagctttgagaccagctctttcataaggtatttcaaatttctaaacgtctggactgaacattctgaatatctgaaaacagttcaggaatactgggaagaagatgtctatggaaaccccctctacatactacatcagaagattaaaaaactttataaagagctgagcaactggtcaagacagactattggtgacatctatgaagaacccaaaaggttgaaagctgagatgacaactcttgaagataattgtgtgaatgacaattctcctgaaaacaaaagagaattatctagaagtagagatgaattgacaatgtacctaaagattcaagaaactatctttaaacaaaaatccagagccaaatggtttgaagaagtgatgctaatacatcatatttacatagaattataaaggaaataaggaggagaatgactattactaagatcatgaatgagcagaaccaatgaatagaagtaaacgatagcacaacagaagctgcaatcagacacatccgaaaaatgttctcacaggatactcaaaccaccaattttgaagctttggattgaattgagagatgtataactgagtaaaataacaacatgctcacaaccacacctactacgcaagaagtgaaagataatgtttttgctaatgacaaggacagtgcaccaggacccgatggcttaaatggcgatttttaccaaacttcctgggacatcatatgttatgatcttcttaaagctatggaatctttttttaatggtgcagagctctccaagttcttcactcacacttgattagtaatgatccccaaggttaaacacctaaagaaattcacagatcttaggcctataatcctgtgcaatgtgttcagtaagattatttttaaaattctcaacattagaatctctagtactctccctaagattatctataagaatcagtctggatttatcaaaggaagagctataactgagaatattctcctaaaccaggagattataaatgacattaggaagacctctaggggtgaaaatgttattattaagcttgatatggctaaagtagatgatagagtttattggacctttatatgtctggctctacggaaacttggcttctcagaatggtggattgatctcatttataacttcatatccaacaattggtacttcattattgtcaatgggggaaggcatggatttttttaaatttgaagaggtttgagacaacgagatctaatatctcctttttttgtttataatcagtgctgagatactatctagaatattaaacaatcttcatgaaagagaaggatacatggttttttatataaatatcaatggtccaaagattaatcacatttcttttgcagatgatactatcatattctgcaatggaagcaaacaatctctggagatggtattgaaaaccttgaaaagttatgagaaagtgtctggacagctcatcaacaaagataaagttgctttgtagtggctaataacactaaagcagccacaatcaacagactcggggccatcattggaatgaacaatcaccattttcctatcaagtatctaggattccctctcaccacaggaatgaggaagatatcatactactctgacattgtcaacaatatcataagcaaattcatgggttggcaaacaaaatccctctccacagaagaaagagctatcatgattagacatatccttctttccctccccatccatctatttgtagccaccatccatcctaaaggcactctggagcttattgagaagtatattgccagagtcttctggtcaggacaagacacaagtggtaaatatcactagactgcttggaacaactatgttacccatacaacgaaggaggagctaacttcacattccttgcagacacttgttgtcacgacccaaaacccactctaggccatgatagcgcccaacgtcgccgttaggcaaaccaacggtgaaccatctaattaattttttattttattactttcgaaatcataaattttattaagtaaagaaatttaagcatttaaaatcacaggtacatacataattagtaaggcataagaataagaggtgataataatatgcaaattcgtaaacatcaaatagaatatcccaaaatccggtgtcacaagtgcatgagtatttactaaggagtacaataataatacaacttctgtctggaatataaattagacaggataaagtaaataatacgatggagactttgtgggctgcgatacgtagcctggaatgcaactcaccataaagcctcctcagcatcggcgcctacgcgcaaagctgaccaccaaatgaacctgtcagatcctggacatttagtgcagaagtgtagcatgagcacttaaatcaacgtgtacctaataaatatctagcctaaccccagataactagtgacgaggggtcgacatcgacacttactaatggtccaataaattagtatgataaagcataaacagatatgaagcacaacagtaataatgaggtaaaacggtaactagcattatcctccaacattttttttaacgatataaatctctcaaatctcctatgctatctcaacaggtcagaaatatcaaatgcaatctccaacgaataaggaaaaccatataaatgccatgcctcaataaaaggggaatctcctaaatatccgaactgctagcggtatcacacacgattatgccgaggtcgtacgactcgatccagagtgatatgtacactgatgagggttgaccagtgtgaagtagagatgcatctcaatatattgttgaggcgttcggcccgatccacaagaaaagaaaaaacttatcaaactacgagtcacgtacgtacaacacaggtacagaggcataaagtaaacacgacttttaccgtttatcaaatatctcgccagacaactcaaggcgataaatctcggcctaatatattcccaaattaattttaattataaattcacttaattaagctagcaagatgagttcaaataatttaaatattacatgataaagtcctaaggctacccggacataaacatgcttttagctacgtaggggatctcgtcacctcgtgcgtacgtagaatccacaactagtagcacataacaattttaatacttatggggtagttttcccctcgcaaagttagacaggagacttacctccctccgaagttccataaccggctccaacgcctctctaacatctcaaaccgatgcccatcaatccgaaactagtcaaacaacatgaaaaccaataaaaatatacgccagcacccataattaatcaatttataatcgttcccaactccgcttgaaaactcaacaaagtcaaccctcgggcccacatgcctgaattttaaaattttttgaagataaacattatccataatactacgaactcgaatatataatttattcctaatctcacgtccaattttatggtcaaaatccaaaaataccaatttctaaatttctcccaaaatcccacaatttctacaaatgtttatgttaatatccatatataaccttatgtatatagattacaataagtgggaataatttacctcatgatagatgataaaaatctcctcctcaagagctccaaaaattgcccaaccaagtgaaaatgaaagaaaatgagccaaatcccatattaaaacaaatctgcccaggcccgctcttcttcgcgatcacagaaaaagcctcgcgatcgcgaaggctaactcatcccagctgcccagttaccctttgcgttcgcaacctcccgatcgcgttcgcgatgcccagccgtccctgcccttcgctttcgcattccacaccttttgttcgcgaaggccttcttcctcacagccatccccctcctagccttcatcgtgttcgcgatcaagcctatgcattagcgaagaagggccaggtccatctccgtgttcacgtgagcctcctcgcgtttgcgaagagaaaaacatgggcccttcaccttcttcgcgatcgcaggactactttcacgatcgcgaagcacaccagcaaaaacaaatcatcctaacttggtctgaaaccaccttgatactcacccaaggccccccgagaccccgtccaactacaccaaccagtcccaagatattacatgaacctgctcgaggcctcaaattacaccaaactatatccaaactacaaatcgacgatcaaaatccttcttttaactttcaaacactccaacttagacgaccacgtccgattcatacttaaacattccagaatgatgccaaacttttcgcacaaggcataaattatgatacgaacctattccaaagctcgaaatcccaaacggacatcgataacaccaaagtccactttaaacaaacttagaaaattctaaaactttcgaaatgacaactttccataataagcgctgaaatgatcccggactatccgatactcaacccgaacatacgcgcaattccaaaatcatcataggaacctattagaaccttcaaatctcgattctgaggtcgtctactaaaaagtcaaaccttagtcaactcttccaacttaaagcttttgaattgagaattttccttccgaatcaactctgaactttccgaaattcaattctggctatgcttacaagtcataaaatattatgtgaagctactcgagggctcaaaccatcgaatgacgtgctagagctcaaaataaccggtcagatcgttacacttgtcatgccttccaagccaaataatggcggatgttgagaactaccaactccctccggaaagaattcatggaagccaagcttttttaacaatgagcatccctctataactcaatggattagtggctaacctcaaagttggaaaacgttttgcaacattaaagaagatgtagaaagcaacaactttaaaatataggtgatggagaggtatctttttgatatgatgactggagtggcttgggtcctttacagcagttgcttcctggcatgactagctacaaccaaattaaggtcaaggatatcatcagtaatggctcatgaaattagaataggttccaaactcaactagatgatgaaacaaaggataagatcaaggctcttaatatcaaaatggacagaaaaagagagacagagccatttggacaccatctactactggaaattttctattggctcagcttgggacaccttcagatagagaaaaaatctagaatattttattaactttgtctgacataaggatatccccctcaagatctctttccttacctggagagccatacatgataaattatctacagaggaaacatgctttaggtttgggatccaagttaacaccattttccactgctgcaacaacaacaaccagaatcctacaattgagaacattgatcatatattctgtttaggggatcatgctaacaaaatttggagctattttgctggacctttggggattgactatagtagcaggaatctcaaagttcaactcctcacttggtggatttttaagaatcacaatcccattgccagactcctcacttcctttgatcatatgttgggagttatggaagtcaagatgcaccaaaaaatttgaaaacatcagaccatctttttataaaacgaaaactaatataatatcaactcttttacaagtactgaaaagcagatttggaagagctaatgtaagggacgatcgacacactatatgtcaagcatgtgaagctatactagagcaaaagactagcacaatggtcagaaggatcggaactaatgctcaaaagatgaagcttaacagtgatggaagttacatccaatgcatttgtggaggaggacttatcaggaataaccaaggaattgtcatttttgcctactcaattcccatggggcctggtactagcaatatggatgaagctgcagcaatgctatttggcctcaaatgctgtgctaataatggctttgaaatagccatggggaaattgactcattgctcatatccaagtgcattaaaagggaatggaaggtaccttggaagatcaccaacatcattagtgaaatctaggacctgctgataaattggcaaacttgagtcacagtcttgattcgatccatgtcttcgactcttttgctggactgcccaatcaagttaaaggcctagttaacatggactgttggaaccttccatctttcataatcaaaagaagcaagccttctcacattatatatatatatatatatatatatatatatatatatatatatatatatatatatatatgaccccccctaatcaccttgtatattagacttttggttagaactaacagcagaagtctcttctcaatgatcatgtataaagtttggaaagccaaactcaaattgtaactttttgcacatcaataataattggaggccaatttaaataatactccctccgtttcaatttatgtgaacccatctgactgggcacgaagtttaagaaaagagagaagacttttgaacttgcggtggaaaatgaggcacatatattttgtatggctataaattattgcataaaaggtaaattatttccaaataaggaaatgggtcattctttttggcatggactaaaaagaaaataagttcacataaattgaaacaaagggagtaataaataaaagccataacactaggggtgaagatggatgttttatattagaaaagcactgatcattcgcgctagtgttaagtttggtataaaattaaaacatgtaacaattgataatcgtacaaggagtagtatatggtataaggatcgtgtttcaatgatattgtgtatttaccctcaaaatcggataacaattaaatttataagtgattttaaggatatnnnnnnnnnnnnnnnnnnnnnnnnnnnnnnnnnnnnnnnnnnnnnnnnnnnnnnnnnnnnnnnnnnnnnnnnnnnnnnnnnnnnnnnnnnnnnnnnnnnnnnnnnnnnnnnnnnnnnnnnnnnnnnnnnnnngcagattaatttgatacaaaacgataaattgagatagattgaacaaataaacatatagtaaattcaaaccacgtgaggaggatgattccaaccttagtgaannnnnnnnnnnnnnnnnnnnnnnnnnnnnnnnnnnnnnnnnnnnnnnnnnatattcaccctcgatccgggctcacaatggccaatactaatgaaaaagaagaagagctatgaataacactgaaaataatagtgtattgctttaggatgcatcttacaatgtgtctaatgaatggtcagaccccctttatatatatatatatatatagtaggagaatcctactctaagtgcaattctgtaaaaggtaaaaatctcatgtttaactgatttctggttctccatcgatacgtgccgagatccatgccgtgatatccagccgctcgcagatattatggccttctgttggtcgtgcttggttgcctgacaatgctctccgaagtcttttgggatgtggaccgatcccgaattacgaccccgatattctatagggcaggtgtcatgcccccagactctaactcggtgagacccttatctcgattttggtgcctcgtcattatatctcgagctttgtttaccctatcggaaattagggtgctccatgagcccgattttacccgtatacagatagtcccctcgtttctcggagagtaattttgacgagacacgacatgagctctcagattccttcctcaatacgctgtgacagaagcgacaagaaacccgaaacgtctcgtcagtcatgtcattatgacttcaaatgtgtgacactcgtcggttggcggttcctggatgcgaagcgttgcgaggcccctataaatattccctcctttgttcattttttactttacatccaaacctctaccctcgtgcctttagaaattcagtaccctcttttatactctagcattttacccccattactcaagatttcacagtacgttgcaagatttttactaattttctactcaagccaacatatctgggctttcaaccttcaacctttcccttatcgttttcaagcatttccaggtaacaatggacaaaacatccaaatccgttcctcaaaaagatgctccttcttcttcgcggccgaccactgaggccgaggagaccgcccctgatgtggtcgtcctcgagaagtctactccgggtgaggccgctgatgaactggcacccgagcccccttgagaatgttcatctccgggggatgttcggtcaatgatgactcaaggttgaaaaaccttcttcagttcaaggccagtgcgaggtggtgtctcggtacgtctgcttcatcagtgaggccgttctccttacggttcgaaaggactgcggctggacggataaggacgtagtgattctcaggcccaatgacgatatcacttcatatgttgaggaatatctaagtgtttacacttatccctttacattgggcccggtagacccggtcatcttggacttttgcacgaggtacgatgtgtgcctcggccaaattcacccatctcattggaggatcgtgatcctcctccgattctttgtgaataaaatcgattcatgcacgttcaccatcgatcacctactcagcttatacggtccccaaatcttctaggggaggactgataaagcttgtacgtcgggccagcaaagccccattctcaagcatcgacgaggaccgggatcgaggttggtaaatacgctatgtccgggtaaagaccgtcgatctgatacccactgagaagtggaacgtattaggtaagtacacctccttcctaatgtcgattatatgttttatcttcctttttcttaccggcatttgttatggtgcaacccttgctcgagttccaaatgctatccctcggctcaaggagtggatcaatggcatttgttcgcagatgacctatgccgaacgctcatggcgcaagctcttgaagggctggtagaaagcccgttctcatggtaagatctttctctccgaataaacagttctagatgttccttttcagcacttatgtcctcattgactatactctctttgcaagcttgaccaagaccatcgagctcaggcccttggtaggaggcgaggatcagcccactgatccttctactttggggcagcctagagccaccgcaagggagaaggaaaggaagagggccccgagttccccgagctcggagaaaaagaaactgagaaggaggctggttcgtaagccaaagaaaacctccagctcccgagtgcttaactcggactcacttctccggctcaggtacaagcccgaggaggataaaatctttgtggcccatgagccatctgtccccgtggaacagatggtagccgagaaggaaacaatgaaagctaatccccctcaggttcgtgaggctgatgccgaagtgagggccgagaactctcgagacaccggtcttgccccgcccggtgttatagatatttcgggattaccttcattcacagaatcaatgttcgatgaagcccgaacgacgtaggagcgatctaataagggggtccatggagcggatgatccccttcgaggcttctttgacggtgtagactcatccgccctggaggacgtcaccggattgggtgacttagaggagtagaggaaaggtccatcctcggaggtcggcaggacgaactggagcccaaggttgatcaaccgatttcctactccgagcacggatcctggccgaagcgatcaatcgttatcaccgtcccgtagcatgcccgggttctttcagcccccgtcggggctacctccggtgcctagtaaacgatgaggaccaggaaaaaatgaacgaggtagatgcgccatgcctgttcaacgaagcacaacaggcgctgaaccgggtaaggtgttaccaaaccttttttatttttcaactttagttcttgatgattctaatatctcttctcacatttgcaggcctcggtgctccaccatgaaaccttcctccggtatcgggatgagttgagataacttgaggtcgaagtcaaagagcttgcttagaagagagacatatgtaagcttctcagtgagcaccatgaaggagaagtcaagagccttcgagccgagttggacgcggctcagaaagaacacgccgacctggtggaaaaggtaaaagtctttgaagttagtaatgacgagctagacactctgactaacagtcagaatctgcaggtccagcagaaggtcgatcgggtcgaccagctcccggccgagatggacgaggtcaagtccatggctgaagagtggaagggaaaaatagaccgattggcttcgaaaaatgagactgcccaggagaagcgcccaacttcgagcggtgagggagaaagttgaggcccgatcccaaaaaatcaaagacctctagtctcaactgtgctcggctgttaccgcaggggataccctcgccaaggagcttgaagcatccaagtcagttgcgaaaataaccagggccgatgctgaagagatagtggcccagtacaaagctgatgcccagacaacccaagaccgattgaaatccattgtcgagtatgtaaagtggcagtcctgaagggaggctctcgaggaagttcatgctcggggattcgatttatcggccgagatcgaaaatgctaagaggctcgaggctaaggccaagaagttggcatagcccaaggacaagtaagactctgagggttcgagcggattcgaggacggagaagaccctgatggccccggtgatgaggcaggctcaggtgaagatcaggcttcttaggtgacttgtagaattttcttcatttttgtacttttgtatttttgttgaggccgtttgccctttgtaaagatttatgtatatgtacaaggttcttttttcccttcgacaattttcaattttgttcctttttgctttttctttacgattgcaaatatctcgaatgccttagcacgcaataataaggtcttgttcggatgttcgaaccacgctcattttttatgtaattttggttaagattcgcgggggcttgaaattatcggaagctttgcccatagttcttacttagaatgttttaggttacaattttgtcgagggtagcctttgaaccgttttagaaattttgaaggccttatgttttggttacggatctcggacgtctccgagccattcttggatggccgtagccttttaagtttgggtgttgcccaataggattattgccccgggcttcgatagcctgagtcgtccgagcttgccttggacgacagtccccgaatggggatggtcgtaacctttaaagttcgggcattgcctaatagatgttgtgcccccgagcttcgatagcccgagccgtccgagcttgccttggatgacagtccccgagtaagggtgatcttttggatccggataggggtagcccttgggctcgatgtcattaaggaacagaaatgtagtagcttttaagagacaaaatatttatctgcaaggtagaaactttcttttatttctgtgcgcaacatacaaggttgcaaatgtgtacaagcctcatgctatggcttgagtggtctatatgggcacggttcatttgaccaattggcccgtacaataaatcgtatccaccgagcccagattgtttgagcataaagtttctttccttgctaaaatcattatccaagggtgatggcccccaagtattcgaggccgattattgagaaggctcggatactgtcgatgtaatcctcgactccggtccatagccggtattcaattctaagttagcagtatccactaatgcctcattaaaaaccttgttggaaaacccatttgggacaaaaccggtccaagggaaaaagagtgtaacatgtgctttcaggcgtaaacgttatatcattccttgaccgttacctacaagtgttagtccaattcgtaatgtatgtaaagaaaagaaatgaatgggatcataccttagcagtagtatcgtttcaagtgggttacgttctagttgttcggtagtcgctcaccattcattgcttcaagtttgtatgatcctttgccggtgatctcgataattcgatatggtccggtcccaattccgtcattcaggtttcaggtattcagtgtcaccttcctcaacaccaagtccctgatattgaaatgtcggaggttggctcttcgattataataccttcgatccgttatttttgggcggccaaccgaacgagggcggcctcacgcctcttgtctaacagttccaggctcgtaatcatggcctcgtcgtttgaccctttgatcgcatatcagaacctgagacttggttctcctacatcaaccggtattagagcttcggacttgtaggccaacgagaacggggtagctccagtgctggattttgaggtcgtatgatatgcccataggacttcgggcaaaatttccttccattttcctttggtgtcggtcaacctctttttgaggttttggagtatggttttgttcgtggactccactttcgcgttcctactagggtgatagggtgttgataggatccttttgatcttatgatcctcgaaaaacttgctcactttgctgccgatgaactgcttcccattgtcgcacacgatcttggtcggcattccgaactggcatattatgtgtcccaaattaaatcaataatttccttctccctgactttctcaaatgcctgggtttccacccatttagaaaaatagtcagtcataaataatataaattgagccttatcgggtgtccatggcaggggggacgacgatgtccattccctatttcatgaatggccagggtaacaagaccaaatgcagcagttccccgggctgatgaatcatcagagtatgcctctgacatccgtcgcatttttgcacgaactccttcgcattttttccatgtcgatcttgtagtagccgtatctgactatatttcgaaccaacgattcggtgcccaaatgattttcgcaggtgcctttgtggacttccctcaacacatactcgctatctcccggtcctagacatatggcgagtgggccatcgaatgttctcctgaatagggtaccgtcttcagacaagctgaactgggccccctttgtacgtagagctctcgattctttaggatcctagggctatttttggtcttcaagtaatatatatatttgcttctccagtcccaggttaagcttgtcgaatttatctcggcgtggccttcttccactactgatttcatgagttgtacgatcattcccgagttgaattcatcatcgtcgaccgatgatcctaagttagcacgagcatcggccttgctgttttgatcccgaggtatatgttgcaaggtccattccttgaaccgatgtaacgtcacctatagattatccaagtaccttcgcatccgttgttctttgacttcgaacgttccattgacctagttcaccatgaggagggaatcgcacttagcttcgatcacctcggcccacaggcttttagccaattcaagacctgcaatcatggactcatactcagcctcgttgttagtcaattttatagttctaatagattttctaactacattacccatcggtggcttcaacacgatgccaagcccagaccgctttacgttcgaggcaccgtctgtaaagagggtccaaattctggatgaggtccccgagttcaacaagaactccttcttgacctcagaaattatggccggagtgaagtcggccacaaagtctgccaaaatttgagatttgatggcggttcggggtcgatattcgatatcgtacccactgatttccacagcccatttggctaatcgtcctaagagttcgggcttatacattatgttcctcaatgggtaagtagtcgcgacacatatgggatggcattgaaaatatggttttaacttcctagaggcgcttagcaaagcgagtgccaatttttacaggtgaggatacctagtttcggcctcacctagagtcctgctaacatagtagataggaaattgcataccttcctctttccgtactaggactccacttaccgctatctcgaataccgccaggtacaggtacaactgttcatctgcctttagagtatggagcaaaggcgggcttgaaaggtagttcttgagttcttccaaggcttgttgacactccggggtccaccagaaattattcttcttcttcaataaagagaagaatccatggctcttgtcggaggacctcgaaatgaaccggcccagtacgactatgcacccggttagtctttgaacgtccttgacattgtccaccatggtaatgtcctctatgtccttgattttatcggtattgatctcgattccccgattagacaccataaatccgagaaatttcccgaatccgaatccgaatgcgcattaatcggggttcaacttcataatgtatttcttcaatatgttgaagttttcctgcaaatgcttcaaatggtcatctgctcgcaaggatttaactaacatatcatcaatgtaaacctccattgattttcctatttgatcttcgaacattcgatctactaggcgttggtaagtggcaccaatattttttagtccgaatggcattatgttatagcagtaggtatcgtactttgtgatgaaggaagtttttttcctggtcgctcgggtccatccgaatttggttgtacctggagtaggcatcgagaaagttgaggatctcgtgcccggccgtcatatcggtcatgcgatcgatgtttggcaaagggaaagagtccttagggcatgccttattcaagtctttgtaatctacacacattcttaatttattcccttttttagggactaccactatgtttgctaactaatccgggtacttaacctcccggatggaccctattttaaggagtttagatacctcgtctttgatgaatggatacttgacttcggactggggcctccttttctgtttgaccgggtggaacttcaagtccaggctcatcttatgagtagttatctccggcggaatccctgtcatatcgaggtgggaccaagcgaaacaatctatgttagctataaggaatttaatgagtttttttctgagctcgagacttaaccccgtgcccaggtataccttatgatcgggcagttgctcaatcaatatgacttgctccagttcttcgaccattgatttggtggcgtcggaatcatcaggggctatgtaagacctgggaactccgtagtcgtcgtcctcacccgtcccctacttcttcggtcggggcggggccggtgtcggtaattgctatttggtttctcccttggtgattgaacctagattttttggtgttgaaagtgcggatatcgggaccacttcgtcgatcaacatctcctttgtggccggttgttctccgtaaattattttaatccctcctagcgttaggaatttcaacacccggtgcagcatcaagggcactaccctcatgttgtgaatccatggcctcccgaacagagaattgtacctcatatctccttcgatcacgtagaaatttgtttcctgaatggttccggtggtgttcaccggtaatgttatctctcctttagtgatctcgcatgccatgttcaatccatttagaactcggactgcaggtacgatttggtcttgtagacctagttgctccacgaccctcgatctgatgatattggtcgagctacctggatcaattaacacatgcttaactcgagatttatttatgagtatagatattactagtgcatcattgtggggctacacgacgccttcaacgtcctcatcgttgaaagataaggttccttctggcacgtaatctcgagtccatttttcccttgtgatggatattttggtgcattttaacattggtccctggggtatgtcgaccccactgatgatcatgttgatgacgtgctgaggttcctcctgctctagagtccttgttcctgaaatgggttttggctcaatcgctcaaaaattctcggagatgtctgttgttgaacaaccgggctacttcctctctcaatcgtcggcagtcttccgtcctatgaccgtgagtgccatggtatttacacattaggttgggtcctttagactggatcagactatagaggtcgaggccacatggtgtctttgatgcgtccaatggcagatacgatggcaacaacatcgacgttaaagttgtactccggtaaccttggcgcttccctgggcccgacggaactgtcgaaactgtttttgctcatgagtccccgattattttgacctcgatcactccttctttcatttctcacgaggttccgcccagaccccttacatcttcggtctccattgtatgattgataccgatccctattcgatcttggttcacgatcaatgtctcccttggatctgtcgatatgcctgacgggataaacggaccccaaaggggccacaagctgatcaccttcaaccctaaaatttgattgataccagctatgtacgtcggcccaagttacgaccgggtattctatcagattttgcttcaacagttgtgaagccaacgagcttcgagtattgagtctctgggtgaaggcttgaacgacctaatcatccgtgactggaggcaagtccattcgttccatttgaaatcgggacacgaattccctaagcatctcattatctctctgtttcactttgaaaaggtccgactttctggtttcgaccttgatagccccagcgtgtgctttcacgaaggagtctgcaagcacatcaaacgagttaatagaattagggggtaagttgtgatactatatcatagctccctttgacaaagttttcccaaattgtttcaacaggatagacttgatctcatcatcctccaagtcgttacctttgatggcgcacgtgtaggaggtcacatgctcatttaggtcggttgttccgttgtacttagaaatttcgggcatgtgtaacttctttggcattgtcttcggagctgcgctcgggggggaaggtttctaaacaaacttcttggaatccaggcccttcgatatcggtggcgctcctgggatctggtcgactctggaattgtaagtttccacctttttgtcattggcttcgattttcttttctcccgattctactcgttttgtcaattccttgaccatttttaggatttcggggttagtaccgggttcagcttcactcggcctctccgtgattggttcatttttgcgagtgatttcccggaccggctcaggctcaattctgctgggagcacgactttggttctgcagctgggctatcgctgcctattgagcctgtagcatttcgaagatcactcgcaagttgatcccatctcctccaatgtcgtgtgtattttgggctgtcgaccggactccacttcggacgctgttctcaggatcggtaggcagattcgtattgttggcaatatgtgagttagcgtcacttaggtccgcgaccggaattccgatgagatcaacaagtggaacctccccactgggtaccatactgttgttctcgccgtggtgaccggactcagcgtccatgtttagaggtgcagactgggcgttcgtcattttgaactttgtcctgaaactaaaaacacttcaaagaacaagtgtaaaatagggtgcgttatagaaatttatatcaaattgccactatcatccttagccccacggtgggcgccaaactgtttatccttaaaatcggattataattaaatttataagtggttttaaggatatgcggattaatttgatacaaaatgataaattgagttagattggacaaataaagatatagtaaattcaaaccatgtgaggaggatgattccagccttagtaaaatattcaccctcgatccgggctcacaatggccaatactgatgaacaagaagaagagctatgaataacagtgaaaataatactgtattgctttgggatgcgtgttacaacgtgtctaatgaatagtcagaccatctcctccatatatagtagaggaatctctaggtacaattctataaaaggtaaacaaatatcatgtttaactgattgtcggttctccatcgatacgtgtcgagatccatgccgtgaattctggccggtcacagatattacggccttctgttggtcgtgcttggttgcgtgacaatgctctccgaagtcttttgggatgtggaccgatcttggattacgatcccgatattctcgagtgcaggcatcatgcccccgaactctaactcggtgagacccttgcctcaattctggtgcctcgtcattacgtctcgagctttgtttaccctatcggaagctggggtgcgcgatgagcccgattttacctgtatacattggcatctagaagaatgtatagatgttgattgagctaagtgatatgaatttttaaaaaaataaaataaaataacgattggaagacgtatagaggggaaatttccactcatcaatgatgatccctttaggtgaaacgattaaaaaagatttcatcaacaaaaacatttttaaataatattttactcttgttaaacacaaataagtccctcagtcccattttgttggcattatttccttattagttcgttcctaaaaaaataatatattatcttaatgataaatttttatagttaatcacacaaatattatatcatgtttaagtcaaaagattttacaaataatacaatgacatgtttataattacaagttttagaaatcctttttttttcatttttaaatttcgtgcgaagtcaaacaacccaaaataaattgaaatagagggattatattatttttcatttaatatttttctttttgcctccctcttcttatcaatcgagagcttcttacatgccaggcaccaaaaatctataagattctttccacattgtcataaagaaaatcattaatttaatttgttgatatttcatttcccaaaaaacatagaaagagaagaatccaaagtaaaaatgtagttaggcaatatttaccttcttcaactaaaattgagcagaaaaaagacagaagtagccaccactctatgggtactatcttcacgtttctgagaatgtattggacctttatttcttaaaatagaaatatagtacactcttttcttgcatttgacagatcnnnnnnnnnnnnnnnnnnnnnnnnnnnnnnnnnnnnnnnnnnnnnnnnnnnnnnnnnnnnnnnnnnnnnnnnnnnnnnnnnnnnnnnnnnnnnnnnnnnnnnnnnnnnnnnnnnnnnnnnnnnnnnnnnnnnnnnnnnnnnnnnnnnnnnnnnnnnnnnnnnnnnnnnnnnnnnnnnnnnnnnnnnnnnnnnnnnnnnnnnnnnnnnnnnnnnnnnnnnnnnnnnnnnnnnnnnnnnnnnnnnnnnnnnnnnnnnnnnnnnnnnnnnnnnnnnnnnnnnnnnnnnnnnnnnnnnnnnnnnnnnnnnnnnnnnnnnnnnnnnnnnnnnnnnnnnnnnnnnnnnnnnnnnnnnnnnnnnnnnnnnnnnnnnnnnnnnnnnnnnnnnnnnnnnnnnnnnnnnnnnnnnnnnnnnnnnnnnnnnnnnnnnnnnnnnnnnnnnnnnnnnnnnnnnnnnnnnnnnnnnnnnnnnnnnnnnnnnnnnnnnnnnnnnnnnnnnnnnnnnnnnnnnnnnnnnnnnnnnnnnnnnnnnnnnnnnnnnnnnnnnnnnnnnnnnnnnnnnnnnnnnnnnnnnnnnnnnnnnnnnnnnnnnnnnnnnnnnnnnnnnnnnnnnnnnnnnnnnnnnnnnnnnnnnnnnnnnnnnnnnnnnnnnnnnnnnnnnnnnnnnnnnnnnnnnnnnnnnnnnnnnnnnnnnnnnnnnnnnnnnnnnnnnnnnnnnnnnnnnnnnnnnnnnnnnnnnnnnnnnnnnnnnnnnnnnnnnnnnnnnnnnnnnnnnnnnnnnnnnnnnnnnnnnnnnnnnnnnnnnnnnnnnnnnnnnnnnnnnnnnnnnnnnnnnnnnnnnnnnnnnnnnnnnnnnnnnnnnnnnnnnnnnnnnnnnnnnnnnnnnnnnnnnnnnnnnnnnnnnnnnnnnnnnnnnnnnnnnnnnnnnnnnnnnnnnnnnnnnnnnnnnnnnnnnnnnnnnnnnnnnnnnnnnnnnnnnnnnnnnnnnnnnnnnnnnnnnnnnnnnnnnnnnnnnnnnnnnnnnnnnnnnnnnnnnnnnnnnnnnnnnnnnnnnnnnnnnnnnnnnnnnnnnnnnnnnnnnnnnnnnnnnnncgtacacatatgctaggcgtgttcttcatatagattaaatatatttccattaagaaaggatctcaaatgactgaaattttcagaacggaaaatggtcaatatacccctgtactatgagatataatttaaatatacacctagtcaggggcggatttagtgcattagttacgggttccgtgaacccagtaatttttatctagattcggtatttgtattgaaaaatacattaaatatataagaatatttaacttggaatccaatcattattgtatattaacttataatttctgtatgaacccataaatttaaatttttagatccgcctctgcccctcgttatactttgggtccaaatatacccctatcgtaatactattggttcaaatatacccctcttccgttaagtttgtccaaaatggatgtcaaatcctacgtgacactaatatttgatgaggtagatggcacatagcatgccacctcagcgcccctaacccattttacctctcccctctatttatttttccactattaaaattttattcccctccaccactaaaaaagtagcaggatgagtttttggaccaatataaccttaaaacaagctgctcataatcattaatcagatagttgttattactaggtggaaaacctttgcttgagggctttgaaattgacttttggacatgtcttacccagaaatgaactaagcttgtgtatacggtcgaaatcgggcatacctgatttcgttagcaagggagttgcctcgagggtaacctcataatagatcgggctcgagcttgaagatagaacatcgcgcctgagaaatcgaagtgttcattgagatcgaggccggcaataatcgagataaaacatgactgacttcgagtaaggcaataacagaatggcgagatatcagtaaccggtcaaaaatcccggcggaaatcccggaacatatcaaatcaaagcgattattagtgccaatcatgggatttacttcctttactagagttgtaccttttttaggattcctctattatataaagagggaccccattcacctgtaaagaaagagaatcattatacactgataagaatatacacatatgctattttcttttacttactgttcatcgttgtttgttccatcctctactgttcttattaacctcgagactatctagaatcaaggtcgaggtattgttgacagaccggtttgatttattttattgtccaatttatatatttaattcggtgcttatcaattggtgctggtctaaatcacatatccttaaaaccacaatataagtttaattgttactcaattttaagggtaaacagtttggcgcccaccgtggggctaaggatannnnnnnnnnnnnnnnnnnnnnnnnnnnnnnnnnnnnnnnnnnnnnnnnnnnnnnnnnnnnnnnnnnnnnnnnnnnnnnnnnnnnnnnnnnnnnnnnnnnnnnnnnnnnnnnnnnnnnnnnnnnnnnnnnnnnnnnnnnnnnnnnnnnnnnnnnnnnnnnnnnnnnnnnnnnnnnnnnnnnnnnnnnnnnnnnnnnnnnnnnnnnnnnnnnnnnnnnnnnnnnnnnnnnnnnnnnnnnnnnnnnnnnnnnnnnnnnnnnnnnnnnnnnnnnnnnnnnnnnnnnnnnnnnnnnnnnnnnnnnnnnnnnnnnnnnnnnnnnnnnnnnnnnnnnnnnnnnnnnnnnnnnnnnnnnnnnnnnnnnnnnnnnnnnnnnnnnnnnnnnnnnnnnnnnnnnnnnnnnnnnnnnnnnnnnnnnnnnnnnnnnnnnnnnnnnnnnnnnnnnnnnnnnnnnnnnnnnnnnnnnnnnnnnnnnnnnnnnnnnnnnnnnnnnnnnnnnnnnnnnnnnnnnnnnnnnnnnnnnnnnnnnnnnnnnnnnnnnnnnnnnnnnnnnnnnnnnnnnnnnnnnnnnnnnnnnnnnnnnnnnnnnnnnnnnnnnnnnnnnnnnnnnnnnnnnnnnnnnnnnnnnnnnnnnnnnnnnnnnnnnnnnnnnnnnnnnnnnnnnnnnnnnnnnnnnnnnnnnnnnnnnnnnnnnnnnnntggttattgttcagtactgattctggtaaaacacaccattttacgcttgttcttgtcaagtatctttgctttcaggttaaaacaagtcaaactcaagaaatgcatccatacacggtgataatggcctcatattccacggtgaaaacggaaatgtgattgctccaagagtcgaggtgccacaggctaatcttgggggagcaccggttgccaacccagtcgatgtcagttcgcacattgctctaaatgcggacctaggcgcaggtctcgatgggagtgtacgcacagaaggctgatctagtgaccaaggaacacaaggaagaggagacgaaggagtcagtctccaagtgatattcgagatgcttcagcctcagcaagccgctattgctcagttacaaaatcaatatagagctccgaatagggtcgagccgaaaattactcaccgtaccgagccagtaccagaaaggttgagtggtaacgaatcggggactgatcttccagtaatgaaaacattcgaggagatcaccaaaagaattgaatcaggggagaagagaaacgaagccaacgataaaaaagtagagacatacaactctcgagttgaccagataccgggggcaccgccaatcttgaaagggatggattccaaagaagtttcgtatgccggacatacccaaatataatggggccaccaatctcaacgagcatgttacttcatatacatacgccatcaagggtaacgatttaaaagatgatgaaatcgaatctgtgctgttgaaaaaattcggagagaccctttcgaaaggagcaatgatttggtatcataacctgccacaaaattccattgactcatttgccatgttagcagattctttcacaaaggcacacgccggggccataaggtcgcaaccaggaaatcagatcttttcaaggtaagacaaagggataatgaaatgatgagggagttcgtgtcccgatttcaaatggaacgcatggagttgccactggtcacagatgattgggccattcaagctttcacccaagggttgaccgagtggagttcgacagcattacgtcagttgaaacaaaatttgattgagtatccagctgtaacttgggcagatgtgcacaatcgatatcaatcgaagatcagggtcgaggacgaccaattaggagccccttccgggtcagtacatccacacaggtcggcagttaaaaaccaaagggacgttgacatggagccaaggtcgaacaaagaacaatatcaaccatatactacagatcgaaagaacaaaggacgcaattccacctggaaagatctaagaagtgatcgaggacagaattatgggggacttatgagcaaaagtggttttggcaagtatgtcgatcccacagaggcatctcggttatcagaatataactttagcattgatgcatcgggcatttgtatcggcaattggaaggatcaaagatactaggtggcccagacccacacaaaccgatccttcccaaagaaacccaaattttatgtgcaagtatcatggaacgcgtggtcacaagatcgaggattgcagtaaattaagggaggaggtagcccgtctattcaatgagggccacctttgagagttcctcagcgattaagccaagaatcatttcagagagagggatgccaataagaaaaatgaacaggaagaatcccaacatgtcattcatatgatcgtcggtagggtcgacatcccacagggacccacattcaaacgcactaaggtatcaatcactagggaaaaatgaacccgagattatgtgcccgaaggcactttatcattcaacaacaaagaagtagaaggcatttctcagccccacaatgatgctctggtaatttctatcttattaaataaagttcaagttaagcgtgttttagtggatccaggtagctcnnnnnnnnnnnnnnnnnnnnnnnnnnnnnnnnnnnnnnnnnnnnnnnnnnnnnnnnnnnnnnnnnnnnnnnnnnnnnnnnnnnnnnnnnnnnnnnnnnnnnnnnnnnnnnnnnnnnnnnnnnnnnnnnnnnnnnnnnnnnnnnnnnnnnnnnnnnnnnnnnnnnnnnnnnnnnnnnnnnnnnnnnnnnnnnnnnnnnnnnnnnnnnngaatatcattcgatcgagggttgtggagcagctcggcctacaaaatcaaatcttgcccccaactcgggtcttaaacggattcaatatggccagtgaaacagctaaaggggagattattctactggtgaacgtggccggaaccattcaagataccaagttccacgtaatcgagggcgatatgaggacaataccttactcggaaagtcttggatccacaatatgagggcagtcccttcgactctccaccaaatgatgaaattcccgacatcggccggtgtaaaaatagtatacggggagcagcatgctgcaaaggaaatgtttacggtcgatgaggtaacgtcgatatcgacgctatcaacctcggaaaggtcgagcatcaaaggtaaacaggaagtcaaataacaatcacaaccaccagcctcgaccgagtcagggaagcaagagatagaaaaagaagaggaggatttctgacccctcgaactgttattgttatcaaagattttgacgccaccaaatcaacgattgaaaagctggaacaggttatactgatcgagtacctgcccgagcgaaaggtatacctgggaacgggattaacccccaaactcaggaaaaagcttattcaatttcttattgataacatagattgttttgcttggtcccatttagacatnnnnnnnnnnnnnnnnnnnnnnnnnnnnnnnnnnnnnnnnnnnnnnnnnnnnnnnnnnnnnnnnnnnnnnnnnnnnnnnnnnnnnnnnnngcctaagcctggaccctaggttcaaatcggtgaagcaaaagagaagaccccggaggaccgagaaacgacttcatttatcaccaagtatggaacatattgttataatgtaatgcccttcgggctaaaaaatgcaggagctacttannnnnnnnnnnnnnnnnnnnnnnnnnnnnnnnnnnnnnnnnnnnnnnnnnnnnnnnnnnnnnnnnnnnnnnnnnnntattcgaagaacaaataagtaaatcaatggaagtttatattgatgacattctagttaagtcactgtgcatagaggaccatttggctcatttgcaagaaacgttcgagattttaaggaaatacaacatgaatctcaacctcgagaaatgtgctttcggggtcagttcgggtaagttccttggcttcatggtatccaatcgggggaccgagatcaaccccgataaactcataacaatcgaagacatcaccatcgtggacagtgtaaaatccatgcagaggctaattggacagatagctaccttaggccgattcgtttcgaggtcgtcggatcgaagccacagatttttctctctgctcaaaaagaagaacgattttgcctggaccctggaatgccaacaggcattagaggaattgaagcgatacctatcgagcccaccactgcttcacactccaaaggcagatgagaaactttacttgtacttggcagtatcgaaatcgcagtaagtaatgtcctagttcgagaagatcaaggtacgcaatttcccgtttattatgtaagtcgaaccttaggagaagcagaaactagatatccacatttggagaaattgtcacttgcactgataaacgcctctagaaagttaagaccatactttcaatgtcaccccatatgcgtattaaccacttacacacttcataatattttgcacaagcccaggtctcgaactagctaaaagcttaggagcagaagtcattgaagccaagtgtgattctttactggtggtgaagtaaacaaaaccttcgaagttcgagaggatagaatgcaaaggtatttggacaaactgcaggtaactttgcaccgtttcaaggaatgcactttgcagcatgtacctcgagaacaaaacagtgaggctgatgcacttgcaaatttggggtcatcgatcgaggaaagtgagattagctcggggactgtcgttcaactctcgagatccatgatcgaggaaggtcatgccgagataaactctacaagcttaacctgggattggaggaataaatatattgaatacttgaagaacggaaagctcccatcagaccctaaagagtcgagggtcctacgaaccaaagctgctcgattcacattggctgaagatggaacattatacagaaggacattcgatggaccattggcagcatgcttaggaccaggagacactgattatgttttacgagaggtccacgaaggcacttgtgggaaccactccggcgccgaatcactgattcacaaaatcattatagcaggatactattggatagcatggaaaaagacactaaggagtttgttcgaaaatgtgataaatgtcagaggtttgcaccggtgatccatcagcccagagaacaacttcattcagtcctatccccatggccattcatgaaataggggatggatatcgtcggccatctgccatcggccccaggtaaagctaagttcattttatttatgactaattatttctctaaatgggttgaagcacaggcgttcgagaaagtaagagagaaagaggttataaactttatctgggatcacatcgtatgtcgattcgggatactcgccgaaatagtgtgtgataatggaaaataatttatcggcagcaaagtgacgaaattccttaaagaccacaaaataaaaaggatattatcaacaccatatcaccccagttggaacggataggccgaatcaacgaacaaaactatcattcaaaacctaaagaagaggctgaacgacactaaaggaaaatggagagaaatcctacccgaagtcctttgggcatatcgaacaacgtcaaaatctagtacggggcaaccccattctccttagtatatagctctgaagccttgattccaatcgaagtcggggaactcagtgccaggtttcgacatacaacagaagagtcaaatcatgaggttatgaatactagcctcgaattattggataaaaagcgagaagccacactcgttcgaatggctgcacaaaagcaacaaatcgaaagatactacaataggagaaccaacctttaccactttggagtcggggacttagtcctgagaaaattcaccattaacactcgagatcctaatgaaggaaagcttggccaaaattaggaaggactctaccaagtcctcgacatcgtcgaaaaagatcttataagctcgacacgatggacggcggacaacttgtatacggtcgaaatagatttcagccttcgtacgtctgatcgagttcgaaagataagcgatcgaagtgagacatcaagatgggttacgaagatggtacaaacaagcttcgaacccgaggggtcgatcaatgtcaagttcgatatcattatcaagctcgaatccaaatcgaactatgatgcaaagtaaagctatcaagcttatgatccagagaccgaccaacattgnnnnnnnnnnnnnnnnnnnnnnnnnnnnnnnnnnnnnnnnnnnnnnnnnnnnnnnnnnnnnnnnnnnnnntaattcaagggtccgagtcagaatcaagcttaagccaagatcgagagctcgagtctgaatcgagctcaagccaaaattgagagctcgagtcaagatcgaactcacagacaaaagccattgcaattccactagaggagagaatcttgacagaaattgtggaaaagttgatttatcaaggacctcccactgagtatttttaattatatttaaagtaaggtctctctactataaaggtggagggttatcatttctgtaagggcagtttttggatagatctcacattgtaattcaagcaccatatcctcttatattcaagagttactcttttaagcctaaaaatcttattcatcttgcttagtcctaaaaatcgtcttctttaaaactttgtttattttacattctttgctgtccatatttgatatttccttttatccttacgatttgtattatgttatatcacatatccttagaactacatataaattcaactctatccgtttttcgggtaaacagtttggcgcccaccatggggctaaggataacagtggttatttgatacgaatctgaaaaaatacgccattgtgttttgcgcttgtttccgaaaatattttgaatttcggattagcaatgactaaccaccaatcaaatggcttcaccaatcgacaacggagccggccttcaagacgaaaacaacaaattgacacctagtactgaaagaccacttgtaaacgtcgttgaagctcaaatcggagcgccaatagatatcaattcgcatgtagccattgaggcgaacctacatgctgaacccgagaatagcatccatggtggtactcggtctgtagctcgagatacccataatgtcgaggaaaacggcgttagcttgcctatgattttcgaaatgttgcaagcccaacaggcagcaatagctcagttgtagagccaaacccagctacaaagcaggccggagcccaatccacctcgataaatcacccacagaatggagccagccatagcgaagtcaaatgagcaagaatcggggactactcctgaaattgctaaattgctcgaggaactcacaaaacgagtcaaagtcaacgataaaaaagtagaaacttatatctctaggtcgatcagatcccgggagatccaccaatgataaaagggttggattcgaaacaatttgtgcaaaaaccttttccctcaagcgcaacctcgaaaccaatccccaaaaaattccgtatgcccaaaatttccaaatataacagaacgaccgatcccaatgagcacgtcacttcttacacatgtgccatcaagggaaatgattttgaagacgatgaaatcgaatctgtattgttaaaaaaaatcggagagaccctctcgaagggggcaatgatttggtatcacaacctaccaccaaattccatcgactcgttagcagattcttttatgaaagcacatgccggcaccataaaaattgcaacaaggaaatcagaactcttcaaggtaagacaaaaggataacgagatgctgagggagttcgtatctcgttttcaaatggagcgaatggacttgccaccattcacacacgattgggctattcaggctttcactcaaggtttgaacgaacgaagttcgacggcttcatggcgattaaagcataacctgatcgaatacccagccatcatgtgggccgacatgcacaatcggtaccaatcaaaaattagggtcgaagatgatcaattggggtctgaacccgctgttcgaagggatactaatcgagaacgaggttcgatcagggatccataccaaccgtacaacggaagccacatagtcagtgaatcgagacataacctcgggaaaaataaaaaaagaagtgatcgaggtcaagggtcccgggggctgatgaacagaagtaggttcgataggcctgtcggatctaaggaagcacctcggttatatcaatataacttcagcatcgatgcatctgacatcatttcagctatcggacgcatcaaagatactaaatggcctcgacccatgcagaccgatcctacctagaggaatcccaatcaaatgtgcgaatatcatggcacccatggccacagaacggaagattgcaagcaactaagagaggaagtagcccggttattcaacaaagggcaccttcgaaaatatttgagagatagggcaaagaaccattttaaaaacagggatttcggcaagcaaaacgaacaagaagaaccacatcatgtcattcacatgatcatcgatgatgctaatatccctcagggaccagtgcttaaacgcactaagacatcgattgtgagagaaaagcgatctcgaactcaagattacacaccataggaaccttgtccttcaatgatgaagatgcagaaggagtcatacaacctcataatgatgcactggtaatatatgtactcatgaataaaactaaagttaagcgtgtgttgattgatccaggttgctcggccaacatcatcacattgaaggtcatagaacagctcggcctacaggaccagatcgtacccgcaaccctggtgctaaacgaattcaatatggcatgtgaaaccaccaaaggcgagataattctaccaataaacgtggccggaaccatccaggaaatgaagttccacgtgatcgaaggcgacatgagatacaacgcccttttcggaaggccatgaatccacaatatgagagctgtacctttgaccctacaccaggtcctcaaattttaacatcgagaggagtcataacagtgtacggagaacaaccagccacaagagaaatattcatcgtcgaggaagcgaaaccaatatcctcgccttcgccagtaaagggatctggatcagaaagggaacgagataccaaatagcaatcacatacatcagctttgacccaagaagataacccgaagatcaaagaatatgatgatcagaggatccctcgatccttcgtgattcccgatgactccgacgccaccaaatcaacgattgaggaactggagcaaatcacactaatcgagcactggcccgaacaaaaggtatacttggggacgaggttgagccccgaactcaggaagaaacttattcaatttcttatcgataacattgattgcttttcctggtcccatttagatataacagggatcccaccggacataacgacacatcggctaagcttggaccctaggttcaaatcggtgaagcaaaagagaagaccccagtctgaggtaaagcacgcattcataaaggacgaggtaaccaaacttctcaagatagggtccattcgggaggtgaaatatcccgaatggttagccaatgtagttgtagtgcctaaaaaagggaacaaacttagaatgtgtgtggactataaggatttgaacaaagcatgccccaaagattcctttccgctgcccaacatcgatcgcatgatcgatgccacggccggccacgagatcctcacttttctcgatgcctattccgggtataatcaaatccagatgaacccagaggaccaggaaaagacttcatttgtcatcaaatatggaacatattgttataatgtgatggccttcgggctaaaaaatgcaggggctacttaccaatgcctagtaaataaaatgttcgaagaacaataggtaaatcaatggaagtttatattgatgacatgctagttaagtccctgcacatagaggaccatttgacccatttgcaggaaacgttcgatattttgaggaaatacaacatgaagctcaaccccgaaaaatgtgcttttggggtcggttcaggaaagttcctcggcttcatggtgtcaaatcggggagtcaagattaaccccgataaaatcaaggccatcgaagacatcaccatcgtggacaacgtgaaatttgtacaaaggctaacgggacggattgcagccttaggccgattcatttcgaggtcatcagatcgaagtcacaaatatttctctctactcaaaaagaagaacgatttcacttggaccccggaatgccagcatgcattagaggaactaaaacgatatctatcgagcccactactacttcacactccaaaaacagacgaaaaactttgcttgtacttggcagtatcggaaattgcagtaagcagtgtcctagtttgagaagagcaatgtcacgacccaaaccgatgggccgtgatgggcacccggttctttactcaaccgagtatcaatgtaacgtatcttttgtatcatactaccataggtaaatgagccggagaggctgccgtgagataagtagaataaaacataaggaaatactcaatatagggtgacccaacttgatataccgacttataaatatcacgtactggcctataaggccataccagtatctgcatacatgacatctatctacaagcctctaagagtacataaatatcataaaggccgggacagagtcctgccataccaatcaatactcatttaaatcatactgaccaaataggcaactccggagcaagtggagtgcacaaacaccttctgcttagctgatagcctactaggagaaatctcaacctgtctatcgggacctgcaggcatgaaacacagcgtccccgggcaaaagggacgtcagtacaaataatgtaccgagtatgtaaggaatgaaaatcagtaaacaatagacatgagaaaaatatagagtaaaagactagacatgtatgccttaataactctacgaatcattaatatttacaatgtcatgcatatgcgtataaatatcataccatgtttaggtatatgcgttcataacatcatcaagcctcggagggcatcccatcatatcatctcggccactgtgggcaaatcagcaacgtataccagctgatcaggtggtggtgcgtatataacgctataaccttttcccatatcccatatacatataatatacgcatatataatgccatctgttcatgggtcaatgtacatatataaatgcatgaaatgcataagaaatacgttaataagatttctcggaatatcataaaatcaatatgcctttcggataaactttatcaaatacgtatttttctgagacccattaacaaaggatataataataattcacctggggaatcaagaatatagacaaccctagtatttcaatgaataaagtcatttaagaaagttgcgtattttgctcgtttcgtttgtatcatttggatcatgccaaaaagaaagaagggatagccttaatatgcccggagtagggaaaaattcgtatgatattcttgagaaagattgcattgtactcccttagaatcgcaaaatctcattgctattataatatggagtctagtatgaatttccaaattccctcaccttcgttcttggctttgcctttatgtataactcccttaccaaatgaatttgttgaagatgctaaaattctcacgttacatgtatatacatgttcttgtatgaactggctgaagcaaactcatgttattttatctcactttgtaaaagagtcaaatgaatcttgttttagattttccatccgtaagtgtctcacttatagtcatatgaaagtcctttacaattaagatttgtgggccccatttgcataatgactaagccacccaaaattcacctaactttgtcattttgcaacataattcatgagtcattaattatagtgatgggctgccacgtaaacggttataaggcttatccaaaaattattcacttaattccttaatcaattaattaatcccccactaatccaataattaactaattatccatataattaagaattatctcaaattacttataatactactcacttttaacacactttatacatcttgctatcatgttcatgtggtaccttgtatggcactagtccataaatacagagtattgtagcttggaccgtattttatcccaaaatgtcaaactttgacaaaattcattttcttcaaattgcttaccctctcaccttcaggaatttagtcatcacttgtttgaaatagcataatgcttatagtctcaaaataatcctattcccgaacttacgtcgattaacttacgacgaaactttaacgtacgaaaatgcaggatgtaatatattattttcgagctttcatcaatttacttatggcgtatttttatgtacaaaaacatggggtgtaacatcttcccccctttggaacatttgtcctcgaatgttgattgatgcacttatcattctcataacttatagctcttgcgaatactttaatactcttcttgccatttaggcaactgttctttgaataaatccaaaggccagtgcatttccccctttaggcctctttctcacaccacggtctatgttcggaatacttccaacctcgtaactcttgctaccttctgtcgtgcagcctgtacgactttttccttgtatgtaagcctatgcgactctctctcctttttcctccagtgttttttagccaatctctaggcctcactttgtaagcatatacagagcttgataagatatctctctagcatctataggtatactaatgttctttgctcgatactttgttgaacttacaaatattgctatatcttatttcatagatccgtttatccatccgtatgactttactaccataactcttactttgatttattgttactgaggtctgctaccaaactccaagttactctcgtttcctttcatcttaagaatgatggtctaatctcatctcatactttgtaacttttatacatccattgttgattcacctcaatgttgatctacaatttactattgataacttgaaacctcttacgtaatacattaccactagggcttacgttgcatcgaggaacatttgaagtgattttcctgatccacctgggggcgataccatacttccataaccgtatttcatagcatcccaatgtgattcaccttacgtgggtattttaatcctgtaaattcatgaaatcattactcaatcgaaggcccaaacgtcatcctttatctatcacaattacacccttattctctcttttgagttcattcaggctatactgagatttctataacttagagaaataatcagctctcttgttttcatgggcttagtcccgaggacttatccattctcgtcaccttttcactcgccctttcttatgcttactcctgtcttcctaaaacctttcgctttaccatactttagcttgcggcctacacatatctatttatactactcgcaaccttccttcaatttacttgcatcatagatttccttatgtcatcctggaacatcaagcgagatatcacatcgtttctaactcttctttattcttttaactagacnnnnnnnnnnnnnnnnnnnnnnnnnnnnnnnnnnnnnnnnnnnnnnnnnnnnnnnnnncttttgatacatagaaactataggccagaaaatatgcaactgacaatgccgttatcattcctggatactgagtctcagcgtttctgtccttctatctgaagtatggactattcacaaccttcttctttgagtatctcgtacgttgttcacctttaccttacttaccttaaaatctcgcatcacatcttctatctctttcatgacctcccttacacacaggtataattcacatccacagcttgaagctctattataatacttgcacctctggtgcatacacaatccggtgagagcgtcatactgactttttatgaggatggtactcttctaactggctatgtcgtatagtcgtaatagagtatggctgttgtactatctctcttgtacctatgatattaagtgtgattatgcaatgctctcaatcatgatgtctaaaattttctaggtccaataatcagactcctaattttcttcgttgatgtaactctttagtttcctcttccttctgaccagcctttgtgaaggcttaagctatcttccgatttgtggctcatggtatttgttattactttagcctttcattgacgctatggaatatccatgacacaatcttctaataattcaatcatttgtttatgacctaagctcaattctttcttttaacttataccggagttttctacggttgtatgattgttaacatatatgttgcatggataatactccaaaatcttaggtgcattcataatgtaattaactctagatcactgatcgaataattcctttcgttccttctcaactttctttaaatgtaagcaattacttttcctggccgttttcccacttgttgcatgcatacttagcttatcttagttcccacgcatgccgaaattttcgtgcaactcatatgatctcgaatattacttttgatttttttcccattccttagccacggtaggggccactttctcatggaatgcatacaatgttgtagtgaaactatttttacatgaccatttcctctttaggtcattgtgcttaggttaaagccttcttccttatttcctcagctagtctttcgttgtagtacttagggaagaccttctgactcttgtaaagctgcgagcttattacatcgtatgcggaattttttttttgatgttcttcctcgcatataattaaccgtagttacttatttctactcccttatgcttgttgggtagctcctgaactgaagttttgactgtcttcccagtgagactatcttttatttccataacattcatacagtaccttttactacctcaactcttatttgaatatttctcaagggtcatagtgtcgtgtctgcgagactgaattcccatgttggggttcactatggttatcttgcacgatttgttgatttgtatgtaacctcttgtctagacataactagactctttctcaatcaactactaacagctcgtcggtccattatcatatctgtattccgcgtaatccctcttggattattccatttgtcttaacttacgtctcgcactggctccttatttatcaataacatctcgggtaggatcctttccttgacatcgtgtttgcataatattatggaatcatagaatatctataggatttgaatcagtgcaatctcattcctttttcatttttatcgcattcttcctttaccattccatagttactagaactacttaattctgacttaatgccacatcacaccatattccccctttaggggagcactaagatttagtgctacgatgatctatatatagatgttttacctcttcatctttggcatcttttcacatcatcgatgatccttactcgcctcgcagtaatccttctgtaccaatgataacaaatttccttactcgcgagggtgacacttagtataactggcacatacagtcccttaagcttaactttgctcacattgcttgctttnnnnnnnnnnnnnnnnnnnnnnnnnnnnnnnnnnnnnnnnnnnnnnnnnnnnnnnnnnnnnnnnnnnnnnnnnnntcattctctgaatttctcatgtatcttcttcaagacttccagtgcctatccttgtagtactcatatctagttgtactattttagagtgtaccatctgcgtgtctcataaggagatctattatcacattggcaatatcctttggaaacgttaactaacacaaacaatccattcaccattttgggttactctaacccctgtcggatcctgatatcttgtcattctcttaaaccatatatgttagtttccatagggcatagctgagatgggtgtggctaattatacatacctctgttactgttgaaggtaactcaaaatgcttatatttttctgcctgaattgtaaataccgataatcttcatcaactgggtacctcgtacccttgtcaccttgctccttttacttgttgaaacttgtatctaccttctgaatttctcgttgccttttaccatatgggtggatagatattcatgccttaggctccttttccagaagctcacacgtcttagtacacatatgatctgctcgagaccttacatttactcagcataagcatgatgcaaaatcgagttcctctgactcaactcttccacaaccgcctttcttgatgaaggttacgtcgtattatgaataagataagagtttagggaattgagttcttacaactaagatctaccacacgatctagagtaagaagaaagagtgacaaccctaaattccatgtagcctccttcttataagtgtggtacacaacacacccataaacaagactctactagacacgacttgtagactccctaggacataactgctctgatacaacttttgtcatgacccaaaccgatgggccgcgatgggaacccggtactttactcaaccgagtaccaatgtaacgtatctttcgtatcatactatcataggtaaatgagccggagaggctgccgtgggataagtagaataaaacatgaggaaatactcaatatagggtgacccaacttgatataccgacttataaatatgacgtactggcctataaggccataccagtatctgtatacatgacatatgtctacaagcctctaagagtacataaatatcataaaggtcaggacagagccctgccataccaatcaatacatatttaaatcatactaaccaaataggcaactccggagcaagtggagtacacaaccatcttttgctgagctgatagcctactaggagaactctcaacctgtctatcgggacctgcgggcatgaaacacagtgtccccaggcaaaaggggcgtcagtacaaataatataccgagtatgtaaggaatgaaaatcagtaaacaatagacatgagaaaaacatggagtaaaggactcgacatgtatgcctgaataactctacgaatcattaatatttacaatgtcatgcatatgcgtataaatatcataccatgtttaggtatatgcgttcgtatcatcatcaagcctctgagggcatcccatcatatcctctcggccactgtggacaaatcattaacgtataccagctgatcaggtggtggtgcgtatataacgccataaccttttcccatatcccatatacatataatatacacgtatataacgnnnnnnnnnnnnnnnnnnnnnnnnnnnnnnnnnnnnnnnnnnnnnnnnnnnnnnnnnnnnnnnnnnnnnnnnnnnnnnnnnnnnnnnnnnnnnnnnnnnnnnnnnnnnnnnnnnnnnnnnnnnnnnnaacatgtataaaatacgtatttttctgagacccgcgaacaaaggatataataataattcacacggggaatcaagaatatagacacccctagtatttctatgaataaattcatttatgaaagttgtgtattttgctcgtttcgtttgtatcatgccaaaaagaaagaagggatagcattaacatacatggagtagggaaaaatccgtatgatattcttgagaaagattgcatcgtactcccttagaatcgcaaaatctcgtttctattataatatggagtctagtatgaatttccaaattccctcaccttcgttcttggcttttcctttctgtataactcccttaccaaatgaatttgttgaagatgctaaaattctcacgttacatgtatatacatgttcttgtatgaacttgctgaagcaaactcgcgttactttatctcactttgtaaaagagtcaaatgaatcttgttttagattttccatctgtaagtgtctcacttaaagtcatatgaaagtcctttacaattaagatttgtgggccccatttgcataatgactaagccacccaaaattcacctaactttatcattttgcaacataattcatgagtcactaattatagtgatcggctaccacgtaaatggttataaggcttatccaaaaatcatccacttaattccttaatcaattcattaatcccccactaattcaataattaaccaattatccacataattaagaattatctccaattacttataatactactcacttttaacacactttatacatcttgctatcatggtcatatggtaccttatatggcactagtccataaatacggagtattgtaacttggaccgtattttatcccaaaatgtcaaacttcgacgaaattcattttcttcaaattgcttactctctcaccttcacgaatttactcatcacttatttgaaatagcataatgcttataatctcaaaataatcccattcccgaacttacgtcgattnnnnnnnnnnnnnnnnnnnnnnnnnnnnnnnnnnnnnnnnnnnnnnnnnnnnnnnnnnnnnnnnnnnnnnnnnnnnnnnnnnnnnnnnnnnnnnnnnnnnnnnnnnnnnnnnnnnnnnnnnnnnnnnnnnnnnnnnnnnnnnnnnnnnnnnnnnnnnnnnnnnnnnnnnnnnnnnnnnnnnnnnnnnnnnnnnnnnnnnnnnnnnnnnnnnnnnnnnnnnnnnnnnnnnnnnnnnnnnnnnnnnnnnnnnnnnnnnnnnnnnnnnnnnnnnnnnnnnnnnnnnnnnnnnnnnnnnnnnnnnnnnnnnnnnnnnnnnnnnnnnnnnnnnnnnnnnnnnnnnnnnnnnnnnnnnnnnnnnnnnnnnnnnnnnnnnnnnnnnnnnnnnnnnnnnnnnnnnnnnnnnnnnnnnnnnnnnnnnnnnnnnnnnnnnnngcaggatgtaatatattattttcgagctttcatcaatttatttatggcatatttttacgtacgaaaatatgggatgtaacaagcaaggtacgcaatttcccatttattatataagacggaccttgggagaagcagaaactagatatccgcacctagaaacattggcacttgcactgataagcgcctctagaaagttaagatcgtactttcaatgtcaccccatatgcatattaaccacttacccgcttcgtaatattttgcacaagcctgaactcagtgggtacgatgtcgaatatcaaccccatatgaccatcaagtctcaaattttagcagacttcgtggccattttcatgccaaccctcgtacccgaagtcgaaaaagaattcctattgaaatcgggtacgtcatcgggggtatggactttttttacggatggggcttcgaacgtgaaggggtccgggctaggcatagttttaaagacacccacgggaaacactattaggcaatctattaaaactagcaggttgactaacaacgaggccgagtatgaagccatgattgcaagtctcgagctagctaaaaacttggaagtagaagtcattgaagccaaatatgactctttgctggtggtaagtcaagtaaacaaaaccttcgaagttcgacaagatagaatgcaaaggtatttggacaaactacatgtcactttgcaccatttcaaataatggactttacagcatgttccataagagcaaaacagtgaggccgatgcacttgcaaatttgggttcatcggtcgaggaaggtgacttgagctcggggactatcgttcaactctcgagatccttgattgaagaacgtcatgtcgagataaattctacgagcttaatctcggattggagaaataagtatattgaatacttaaagaacggaaagctcccatcggaccctaaagattcaagggccctacggactaaagctgcacgattcacgttggcttcagatggaacgctataccgaaggacattcgatagaccattggaagtatgcttgggtccaggagatatcgattacatcctacatgaggtgcacgggggtacttgtgggaatcactccggtgcagatccactagtccgcaaaaataatcagggcagggtattaggatcgatatgggcaaagttgcgaaggaatttgttcgaaaatgtgacaaatgttaaaggtttgcaccaatgatccattaacccggggagcaacttcactcagtcctatacccatggccattcatgaaatggggaatgtatatcgtcggccctctaccatcgaccccaggtaaagttaaattcattttatttatttatgactatttctctaaatgggttgaagcacaggcattcgagaaagtaagagagagagaggttatagactttatctgggatcatatcgcatgtcgattcgggatacccgttgaaatagtatgtgacaatgggaaacaatttgttggcagcaaagtgatgaaattcttcaaagatcacaaaataagaaggatattatcaacaccgtatcaccctagtgggaacggacatgctgaatcaacgaacaaaactatcattcaaaacctaaagaagaggctgaacctaaaggaaaatggagagaaatcctacccgaagtcctttgggcatatcaaacaacgtcaaaatctagtacgggggaaaccccgttctccttagtatatgagtccgaagccttgatacctatcgaagtcggcgaacccagtgccagattttgatacacaacagaagaatcaaataacgaggctatgaacactagctcgaattatcggacgaaaaacgagaagctgctctgtccaattggccgcccaaaaccaacgaatcgaaagatactataatcgaagaaccaagctccgccattttaagcccggggacttagttctaagaaacatcaccctcaatacccgaaatccgaacgaaggaaaactaggaccgaactgggaaggaccatatcaggttctcaagaacgtcggaaagggatcatacaagctcgacattataaacggcaaacaaatatgaagcaattggaatgtgacacatctaaaacgatactactgctaaggtacgaccctcccatattcatttacatttcaaaactaacccctgcagaagtccgatcaggagctaatatggatccttcaatacgaagccttaggtctgaaagcacgcgttgcactcctttttccttagaccagttttatcccaaatgggtttttcggcaaggtttttaatgaggaaaccaataatcgtgctacacttacaatagtatccgaggcctctttacaattgacctcgaatactaaggggcattagccctcaaatatatcaagttctgatgcaagaaagttatttcgcaacaacggggttccaataggaaaagttgtaagagccaaatggtcaaaacgaaccatgctcatatagttggcccgaacccagacgcgaaacatgaacacatgtataatgacttgaaaagaaagttctcctctttaccgatatcttatatccaagaaatattcctctatttggagatttattatgcaaatagaattaagataaactcgaccactaagcctacgggctacttttattttgagttcgagcaaacactcactcgaccattacacctacgggctacattacttcgagtttgaatcattcactcgactaagcctacgagctacttttatttcgagtttgagcaagcactcactcgactattacgcctacgggctacattactttgagttcgaatcattcactcgactaagcctatgagctacttttatttcgagttcgagcaagcactcactcaactattacgcctacgggctacattacttcgagttcaaatcattcactcgactactaagcctacgggatacatttatttcaagttaaagcaagcactcacttgaccattatgcctacgggctacattactatgagttcgagttcgagcaaacactcactcgaccattacacctatgggctacattacttcgagttcgaatcattcactcgactactaagcctacgggctacttttattttgagttcgaacaagcactcactcgaccattatgcctacaggctacattacttcgagttcgaatcattcactcgactaagcctacaggctacttttatttcgagttcgagcaagcactcactcgaccattacgcctacgggctacattacttcgagttcgaatcattcactcgactactaagcctacgggctacttttatttcgagttcgagcaagcactcactcgaccattacacctatgggctatatttcttggagctcgaatcattgactcaactaataagcctaagggctacatcacttcaagtttgagtaagcgctctctcagttataaaggctacgaagtccaaatttgattaagttgtttaaatccttgcgaaaacattcataaggcgtgaataaagtcttcacaagacaggaaacaaaatagaagcaagttggcaaaaaaggggatatttttatatacaaaattgtttacatgattgattacagcgtaaatattaaggactaagcttcctgatcatccccgggagtagtctcttctctatcagtctcccccctattctcggattcgctcttactctcatcgtcatcatcattttcatcatcatcgtcattgaaaaccaaggcttcagcatcggcttcgggttctttggccctttttatctcttcagcgagatcgaaaccacgagcatggatctcctcgagggtttccctccgagatcggcacttagcaagnnnnnnnnnnnnnnnnnnnnnnnnnnnnnnnnnnnnnnnnnnnnnnnnnnnnnnttcagcgaccgaatgtgctcgagtatcgacagtctcggatgcctctcttgcttggagctgggaaactttagcatcggtccgatagacgaccacgagtgcatccgcatcggcctttgccttttcggccttagcaagtacagaggccaaccgagcctcgagctcctctattcttcctgcttgaactaggcctttttccttcattctctgaagttgggtttcggccgatgataactgggctcgagtagtttcttctctgcagcaaagaggtccataccttctttccactgcaaagactccgcttttatcacatcgacctcctcacaaagcttcccaatcatctcaattttttgctgcaactgtgagaccgaaaaattagccatcgtttcggtatcaagaccataggcttttgaaagtatcattacctacttagacagatcggtctgatctcggtaagccttggccaactcagctcggaggtcttttatttcctcttccctttgccctaagagatgttttagggagttcctctcctcagtaacccgttgaaggtcggcctcgtatcgacgcagctcgttttgggaccgaaaacatgcttctcgatgaattgctgctgcctgcaaagaaacaagaaacgaagttagaaacgaaaagtaaacataaaggtagtaccgacaaaataattttaagtcttacatgattcaaagcctgatgcaccccgtgaaaaagatctgattcatcactagtaccggcaacgtcctcgatatcggtaaacaggtcacgaaagggatcctctccatcatgaggcctgtctagatcaagggcccccaaatcatgggcttatcgaatcacccctgcggaaaatgcggggaaggtggacgaatcttcgattgctgctgccccaaatgaatcacttggagcattctcttcggttcgaagggattcaagaggggccccttcagacatatcccccatccgttggttccgatgggatgcgtctttgatctctgataattcaggaattccgcccgaatctttctccggtatatcctcagttcgaggtggagcctcatgaagcatcatcgatctagctgccgatggggcatcggtggttctcttcgttcgggccgccagcgcagacccatcattttcttcttcatcttcatcccttagacgcagaactgattccacggtcaaaggaatggcattattgttcggcttacgagccatcctcttcttcggttttggatcttcgggaacggaggctcttttccttttattttccttcaccggctttgggacggaggccaaagtttcttcctcgttggacaagggcctcaaattcgcatctttgcccaaacctgcatatgtaaaattttattaaaatatttggaaagcatctcgtttgaattatcaaagagtacgagaaagaggcttaccatgatttttggcctcccatcgaccctttgacaaatcatgccatgaacgctcgacgtatgtggaggttgaaacaagagctcgtacccagtttttgagatcgggaactgctccgagcatccagggaaccgctgcatcacaaaaagaagagtattgatgagaaaataaatgaaagaacaaaatagaaggaagtaacagcaggatcacacttacgtttcatattccagtcctcgggaaaggcatcttttcggtcggaatcaggtctgaagtcctcactctaacaaacctggccatcgagccccgatccttttcctcgtcaatgctagagaacagagccttggtagcccgacactgaagttttattaaccctcctcgaaaaagtcaagtacggtacaatcggataagatggtcgagggtgaacgtcatcccctcgattttgttcacaaagtatcggatcaagataacgatccgccaaaaagaaggatggacctagactagggttatttggtattgacaatagaagtcaataataacggaatcgaggggacctaacgtgaaaaggttagtatacacattcaaaaaccctttcacgtaagaggtgatatcttcgatagaagtaggaattattatttcttttttatcccaattgcaatatttctttagctgtttgaggtgtttctcggttatcgaacacatgtacctcgatactggctcacatcggccagggaccgatgagcctttatcgaccttaaaagcagaagtaagaacacacgccccgggaacgtactcctcaggccgtggttctgccggtgtctcatcggcggcacactgtgaagatgaagccttctctttctgaggaatggtttgtgatgttttcgccattttcgagatcaaaggtgaagaatagaagaaagtgacgaagatttggtaaaattgaagagggccgttttgcaaagagaaatcacagatttgcgggcaagttagagaatacgaaaagagacttgggaaatttggaagattgaagatgtaaaagtggtaaatgatgaaaggaagggttatttataggtttaagcgatggcggttcagtatcagcggtggctgaccatcgtctgacatgcattaaattccttgaaagactaaatcaacgggacagctatcacgtgcatcatgatcgagctcgatggaaacgtcagtttataatccgatcgagtcgttgaaaaattatatcgtttatcaccacattcttcctgagaaacgaggggactatctatatacggtcgaaataaattttggccttcgtacgtctgatcgagtttgaaagataagcgatcgaagtgagacttctagatgggttccgaagatggtataaacaagcttcgaacccgaggggctgatcaatgtcgagttcgatatcattatcaagctcgaatccgaattgaactatgatgcaaagtaaagctatcaagcttatgatctagagaccaaccaacattgacctcgaattaattcaagggtccgagtcagaatcgagcttaagccaagatcgagagctcaagtctgaatcgagctcaatccaagatcgagagctcgagtcaagatcgagctcacagacaaaagtcgttgcaatcccactagaggagagaatcttggcaggaattatggaaaagttgatttatcatggacctctcactgagtatttttaattatatttaaagtaagatccctctactataaaggtggagggttatcatttttgtaagggcagtttttggatagagctcacattgtaattcaagcaccatatcctcttatattcaagagttacttttttaagcctataaacttgattcatcttgcttagtcctaaaaatcattttctttacaaatatgtttattttacattctttgcagtccatatttgatatttccttttatccttacgatttgtattaagctatatcacatatccttataactacgtataaattcaactctatccgtttttcgggtaaacacaactgcctaataattggagcatatcgcttctcaaacggtattactgctaagacatcgagacctcaggttttaaaacacgcgttgcactctttttcccttagattggtttttgtcccaagtgggtttttccggtgaggtttttaacgaggcaaaaattatgtgctacctgaggacaattcaacagtatccaaggcttctttacaatcaacctcgaatattggggggacatcaccctcagattttacactttcaaggaaaacacttcgtgtcagagggtctcgatagagaaactttgtaatgggccaaacggccgaatgaaccgtgtttgtatagattagtcgagctccaatggaaaaacatgcacgtataaattatacaaaaaagcattttttctatatcaaacatcttgtgtctaaaagaaacgtttctactatacaagctccatacttatgagtttgtgagaaatggctcaaggtccaagtacaaatatacctcgtacactcggggactgccatcgacaatcgacatattcgagtaatctaaactcaaattcataagacctcaaagaggcacacctcaatctataggccaagaacatcactctcggggactaacacttcaaacaagtttgaagtgttattgggaaataagcccaagaggcatacccaaaggctacggccaaattaaggcggctcagagacgtccgaatcccacaataaaaataggccttcgaattctttgaaaaaatggtttaaaaagtctaccctcggcaagtaatcaaaagtgtttcgatgaaatcagccctcgaaaaaccttaagaggtatcaaattatcttaacacaaacatgctaaggcacaaaaatcaaaggggtttcaatgggtaaagaatgcgtgttaaggcataaagaaattttttactaagtcttctaagccgaaaaaggggaaaaaatagccatcttttaaaggccatatcggcccaatctaaagtgcctaagggccaatacacttagagttcgagattttattctcactcaattcagatctaagggttccactattccgagcccaaataaaactgacttgaatatagctcgagaattcttcattatttgatataaaaccttaaggagtctgttactgtgagttcaaaacttactcgaactcggctataaaaatagtataattatggcttcgaccaagccatccgaaatcaaaatcccgaacatattgttgagctcggggactcgcctttgcttaactaaaaatcctaagggtttcttctactctgagttcgagctattgctcactcgattatagaggctatagcaacccgattgcaacaaagtcttcataaggcaaaggcaaaatagaatttatcataaatcaaaaatcggagacgaaacggaaagaaaagaaatctttcatatatgcaaagtatttacaaagaccacacatggccttacacaaaaaaaaaaggataaaaaatcttaagtgcctagtccgccttggaagttgcatcttcgggagcttcatcttcatttcctccgctctcggatccactcgcagagtcttcatcatcgaaaagaaaatctttgtcttcgtcctccaaaacctttgcactctcgatatcagccatgaggttgaagccacgagtatgaccctcctcaagagtctctcttcgagattggcacctagcatgctcggcaacacgggataatctaacctcagcagtgtcagaaatttcctttgccagagtgttagcggcttcagcgtcggctcggtaggaggccatgagcgcctctacctcggatgtggtccttgcaagttcagcagccaaccgagtctcgagctcttcagccttctgggcttaggccaagttctcaaccttcaaactttggagttgacactcaatcgaagaccgttgggcccgaaccgcatctttctccgaggcgagttggtccatgctatgcttccaccccaaagtttctgcctctttcatcttggcctcctcacgaagttgctcaaccaatttggctcgaatgcttatgatctccttttctttttgcacatagaggagtttgatggcgtctctctcccccgtaagctttttgagatcagcctcacatcgggccagttcaactcggtatttggaggatgcttctcgatggagcgccgtagcctttacaggaagaaaggaaatcagacttagagaaataagaacaaacgcaagcatggtaacatcatcgaccacaagtaaaacttacttggttcagaagccactgagcctcatcaaaaaggagtgatgcgtccaggtcggaaacatcatcgacccccgcgaagcaacacgaaatatatcatccccttcgggggccgtccccacattgggtgtccccatggaccgggcatctcgaaactgcccctcagagaatgtgggatcgggcggcaaatcatcaatattaattgccccaagcaagtcacttggggctctttggagggcctcagaactagacccttcgagcacacccaccggttgctcatcataataggaggcatcctcaagacccgatgactcggggactctgctcggaccttccatcgagatcacctcggtctgcggctaaacctcctcgaccgtcaccgacttagcagttctcgaaactttgatgcccccctcttctgagccaccagcaggaagtcgatagtttctccctcctcgtcttcatctcgtagcgtttggagtacatcggcaggcagaacgtcgagattagtcttcgactttcgagccctatttttcttgggctttggggtatctggtggcgaagcccttctcattttcttatctttgatcggcttctggacctcctattccccgaggggaggcggcctcataatgacattatctccaagacctgtatgagaagaaatcaagttaaaaagaagtatttaacaggaaagcatcaaatgcggacatgggaacttaccatgatttttggcctcctatcgacccttggccaaatcacactacgagcgctcagcatacgaagaggttgaaaccagttgtcgaacccaacctgcaaggttcgggactgcaccaggaaagcaggggaaagctgcaccataaagaagaatatagatgagaagaggtaaaggaaacataacaagtaatcaaatgttaccggtgaagttctacttacgcttcatgttccattctttggggaatggcatcttctcgacggggattaaatcggaggtcctgactcggacaaaccagcacatctatcctcgatccttgtcctcgtctatgctcgagaatagcaccttcatgacccgtcgctgaagccttatcagtctgccccaataaagacgggggctgtatagcctaatgagattatcgagggtgaaagacatcccctcgatcttgctcgagaagaatctgagcaaaatgacaatgcgccaaaaagaggggtagatctggcctagggttacctggtattggcggtagaagtcgattatgacgggatcgacggaagctagtgtgaaagggtaagtatacgcacttaagaaccctttcacatgagtggtgatgtcctcttcgagggtaggaattaccacctctttattctcccagtggcagtcctttttcacctgctcgagatcgccttcggatatcgaacagatgtatctagacatgggctcgcatcggccaggaaccgaagagggtttttcgactttaaagtcggaagtaagttcacatagcccagggatgcactcttcgatacgtggctcgaccggtgttttatcaccggcctgccgcgatgagaaggccttttcttcttgaggaacggtatttgatgtttttgccattgctatatgaggtttaaggaagaagaaggcggaatttgcgttttaataagagattggcaaacggaaaccgacaaagttgatggacatgaagagaatataagagcttttgaagattagaaaaagtttgaaagtaaagtttgaaaagattatgaaggtggtctatttataataaccactttgacggtttggaagcactggtagccgactatcaactggcgttaattaatgaccttgggaattgcgcagacgcgacgcttcaatcgcttctgtcgcttacgtcacgatgttgacatcataattgatcgaggtagtaaatcgaagtctcaaattcctttcttcttgttacactccaaaaaatgaggggactatctgtatacggtcgaaatcgggcatactcaatttcgttggtaggggagttgcctcgagggtaatctcataatagatcaggctcgagcttgaaaatagaacatcgcgcgtgagagatcgaagtgttcattgagattgagtccggcaacaatcgagatcaaacatgactgacttcgagtaaggcaataacagaatggcgagatatcagtaaccagtcgaagatcccggcggaaatcccggaacagatcaaatcaaagcggttattagtgccaatcatgggatctacttccgttattagagttataccttatttaggattcctctattatataaagagggatcccattcacttgtaaagaaagagaatcattattcactgataagaatatacacatacgcggctttcttttacttactgttcatcgttgtttgttccatcctctactgttcctattaacctcgagactatctcgaatcgaggtcgaggcattgttgacagaccagtttgatttattttattgtccaatttatctatttaatccgttgcttatcaattggtgctggtctaaatcacatatccttaaaaccacaatataagtttaattgttactcaatttttagggtaaacaatttgcttatgaacaacaccttcgactggctttgtttgtttccattagggtgttccttgttttctgctactttgtttttctttgaatcttttacaacacaaacaaaatgcaataccttttgccttggccttgaaggacaagcaactaattatattataacgtgaaatttgtccgtcttttcacgctggtgtttctgtgatgttgtgtaactttcctcatctttgaattttgcagttaatatggcagaaaaagaagaaaggtatttcatgttatcaaaactgtcacttttatcattttctttcaatgaggagactatgtttgaatttccacatttaaaggggaggggtaaaatgggtaggcgcggggtggcatgtcatgtggcatccacctcatcaagtattagtgccaaataggatttgatatccactttagacaaacttaacggaagagggtatatttgaaccaatagtattacggcaggaatatatttgtactcaaagtataactaggagtatatttaaactatatctcataatatatgaatatatttggcccttttccgttttcagaaatgaacgtgacttcagttctcgtgatatatcatttctttaattgatgaagatcagtacattatttaatttatcatcaaacattattagaataataaatataaaaaaacagaacatacacgtgcttaaaattgaaccttcacggaaattccaaaaagaaaataaaggtactgcagagtctagagctacaatttgaagggcaagcgtataaatagacgtacgcaataagtcctagtaagaacaagttcaagaaactattcatccaaaacctaattagggcaacaaaaagaaatgaatccagctgataatgcaaccttctctttctctgaccttgattttcttgactctattgaccaccatcttctgattaattccgatttttcgaacagtttttcgccgatgagttcgagcaacgtcgcaactcctaatagtcnnnnnnnnnnnnnnnnnnnnnnnnnnnnnnnnnnnnnnnnnnnnnnnnnnnnnnnnnnnnnnnnnnnnnnnnnnnnnnnnnnnnnnnnnnnnnnnnnnnnnnngtagttcaagttttggcagctgccttttggatgaaaacattgaagaaacaacaactctcgaatctcaatccgagaccgaggagcaaacgcagggcggaaaggcggcgcgtgagagaaacacgaagcaagattggaggcggtacataggagtgagatggcggccgtggggaaagtttgcggcggaaataagggaccccgacaggagaggtgccagactgtggctaggaacttatgagaccccagaggatgcagcgttggcttacgatcaagccgctttcaaaatccgcggttcgagagctcggctcaattttcctcacttaattggctcaaacatgcctgagccggctagagtaaaagnnnnnnnnnnnnnnnnnnnnnnnnnnnnnnnnnnnnnnnnnnnnnnnnnnnnnnnnnnnnnnnnnnnnnnnnnnnnnnnnnnnnnnnnnnnnnnnnnnnnnnnnnnnnnnnnnnnnnnnnnnnnnnnnnnnnnnnnnnnnnnnnnnnnnnnnnnnnnnnnnnnnnnnnnnnnnnnnnnnnnnnnnnnnnnnnnnnnnnnnnnnnnnnnnnnnnnnnnnnnnnnnnnnnnnnnnnnnnnnnnnnnnnnnnnnnnnnnnnnnnnnnnnnnnnnnnnnnnnnnnnnnnnnnnnnnnnnnnnnnnnnnnnnnnnnnnnnnnnnnnnnnnnnnnnnnnnnnnnnnnnnnnnnnnnnnnnnnnnnnnnnnnnnnnnnnnnnnnnnnnnnnnnnnnnnnnnnnnnnnnnnnnnnnnnnnnnnnnnnnnnnnnnnnnnnnnnnnnnnnnnnnnnnnnnnnnnnnnnnnnnnnnnnnnnnnnnnnnnnnnnnnnnnnnnnnnnnnnnnnnnnnnnnnnnnnnnnnnnnnnnnnnnnnnnnnnnnnnnnnnnnnnnnnnnnnnnnnnnnnnnnnnnnnnnnnnnnnnnnnnnnnnnnnnnnnnnnnnnnnnnnnnnnnnnnnnnnnnnnnnnnnnnnnnnnnnnnnnnnnnnnnnnnnnnnnnnnnnnnnnnnnnnnnnnnnnnnnnnnnnnnnnnnnnnnnnnnnnnnnnnnnnnnnnnnnnnnnnnnnnngagttgtcacaattcatgctcactggagccatcgtcttcttcctccaccccattatcggaaaatgggacaaggaaaagaaatatagatgtaataaattctattgccaaagccaaatcggttggtcatatccgcaatctacacatgttactataactattcggaaggaagagttttcagttcttttttcaaatgcagtaacattaccgcataaataattactgttcaatcatgttattttcattcgtacgttcgttatttatgttttctacgtagtaattaatgctcgttaaattagcataattttctcaaagacactatgcataatgcagagaaggaatacccgatcgaataagcaaagttctaagaaaccgtctgatcaagagtttctagagaactttctaagaaaattatgcaaaaatgtcttttagaaacttgttaaaagatttatatttggatatccgctgtttaaaaaacgtctttttatgaaaacatatgctgcttaattaattaggtatatgttctctaagaagctgaaaatattaactctaattctttactttataaagctatcaataatttcaactcattacaagtaaatctccattctgtaaacgtttaaccatgtcaatgaaggagtataaagtattcaatgtttaattatttgcaaactgatattcggcaatcagttccggtttgtaatgatccacattagtttctcatttcaataatatccggtcttctttaggaaaaaagaaaaataagaagaagaaaaaaagtagttaaagtagacttgacccgggtaggcttcctcttcactcctgcaattttgagaaacaaaaaaaaaccataatcatatggaatcttctctaatattgcacatgcgtgtttgacaaatttcaattattgaatactttttaattcccaacactgtatcattaagtacgaatcattaagtacgaagggtgatgtcgtgccattttttatatattattgtgtgttcatggcacgaagagtattttcgtgtaggcgaggacaagagaatgcattatattgctgtacttgaaactatataataatcaaggttccttatgtaacctatcacaacttgtatttcattacacaaactacatatattcatttctcaattaaatttataatggcttcttttcaacgaatgaattgtacttttaatttaccattgcattagtactgctaatagttacgaatactcaactagctaatacttttctctctacaacgactagtttatctcccctgtcctaaagcgtacggctcacgctccactagatggagccgccgggaggcatcccaccggtgcgtacggcagcttagtcactcccaacaggcgaaatggctcttagagatgattctaaacagggaaaaccaacctatgcaaacaccatcaccgctcctctacatcctctcagatgctcaatccaaattccaattgataggataaagaaaaagtgatagcaagacatacgactcacaatggcatgccagcagtgatatttaaagctaaagactactacggcataatggtggattcttgtaagtacacaattgtgggaagatttcttcgaccacgcccccaaattgaccgaattaggtcaagatttaaggaaattataccattaaaggggacagtcagaataggggtttatgacaatcacaacgtcttcattgatctcttcaatgaggatgactggaaatcagtatggttaagaagagtaatcgaaatcgacggaatgcaaatgtggctacaaaagtagtcaccggacttcaaaccagaggaggatttgccagtcgctccggcctgggttcttctgccagctcttcctttttatattcatgattggcactacataaaataattattgagctctgtaggtacgccccttgctctagatgctgctactatgggtagaacaaggcctagtatggccaagattagagtggaggtggacctattaaagcctttgccagatagtctttttgtgggacaggaatatgacgaatcgccgttaaaatgttatacccaaaaattagaatataaatgtgttccgaaatattgtaaacattgtcgaaaattgggccattacatagtcaattacagggcactagaaaagaaaaaagctaatcaagtgaaggaggagggagatggagatgagattaccaaaaatgaggacgatgctcaatctatgaacaagacgatggataataacaatgttggcaaggatgacaaaattcaagttgattcttatagtgttgacattggtaaaaagcaacatgaagatggggatgacaacactaagatcattaacaataaggaggagaaaagcatgaagaaaagaactaagaagaagaaagccaagaagatgccgaagaagaaaagcaaggtaaagttcaaacctgtccaaaacaataacaagaagaatgttgtatctacatcgacgagcaaacaaaatgatcaatctattgcagagattagggacaacatatagaatcaagatgatcaggatgtgcaagatgacgagaagcagtgcagtactaatgaaaactgtaggaaagaagggcaagagaaggaggaagctcctaatatacaaatggaagatggaaacagagggtctgataataaggagaatagcaattaggatgaggaaagcaaggcagaagagaagcacaagcacaccccttgtgattctaatacctctattgtcccaacagaaataagaaatttacctggaataaacttagttgtcaacttagattgcaaagagtgggaacaagaagtgaataagagtagtactaacataatcaataagaactccataagaggtagtgaaactgagaatgaagacatagaggaggttacagaaagtcaggaagatgataatcaatacattgtcaaaagagggataagtgaaacaagaaaaagtagcaaaaaagccaaagaaacagaacacacccttcacaaagaaggaaacaaagagaggataacaccccaaattgttcttatgattagtgcaatcttctggaatataaggggagtgaggtccaaaaaagccattcacaggcttaagaggctgattgacatcaacaacactcattttgtggcggtctttgaaccttttatttcgaaaaaaaaggtagatggttacaggagattcttaggctaccaacattgtaattcgaatggtaatgatcaaatttggtacttctggaactcttacaacaacaaaatgatattctcggaaagtgatcaatatattacaatcaagttggagaaggctattagtaatcaagatatccttattacggctgtttatgctaaatgtaaatcagaagatagaaagctcctttggtcatctttgcaatatgatagtaatctggtgaatgctccttggtgtatcgagggtgattttaatatgatccttgatccaaacaaaaaattagagggtaaacctcatagaatgtacaaaagcattgattttcagaattgtatggatagttgcgatgttacagatattggttactctggaccaaattttacttggtacaataacaggagacccaggaagaggattcagaaaagattggatagagtcttcgtgaatgacctatgggacaatctgttccaaagatgctcaattaggcatatggaaaggactggttctgatcatagacctttattcatgaagaatctatatgctaatcacaattgcattagatatttcagattcctcaactgttggattaatctgcctggcttttataatattgtcaaggaaagttggaattcaaatgttacgggtaatcctatgtggatcttgcaaacaaaactaaaggctctcagtaagagattaaatcaatggtccagggaatacatcagcgacataaatgaagccattaccaattgggaggagaaacttcaatactttgaggataaagatatcgaagacaacacaaaattgagcagagaagaagtgaacaaagcacacgccgaatacattagatggctgagtatccaagactccctcctcaagcagaagtctaggataaaatggtttaaagatggcgacaagaataccaggtattttcactgcattctcatggaaaaaaggaggaagcaacaggtaagtagaattaagaatcataaaggtaaatggattatgggggacaagaaaatctctaaagcagcaatcaagcatttcaatgtccagttcaatttacctactccaaacctcaacccctctattttagagtgtattcctaaatgtattacggagcagaataattcaattctcagtaagatgccagatgaagaggaaattaaaaatgcagtactgagcctaagtggtgctagcacaactagtccagatggttataatggtgcctttttccacaactgctgggatattttcaaagaggatgtcgttgcttttgtgctagaggtcttcaaatggaaagttttaactaaattcttctctcatacttgtttagttatgattctcaaaattgattctcctgctagttttttagagtttagaccaattagtttgtctaacttctctaacaaaattatctctaaaattctctcattaaggcttaaccccttgttgcataaattactttctcctaatcaaagtagttttgtgaaggatagactaatctacgaaaatgttttattagcacaagagactattcacaatatttctgacaagaacaagggtggtaatgttgtcattaagcttgatatggctaaggcctatgatagaatatcatggccctttctttactctgtgttaagtaaatttggcttctctaaacattggatagagatggttcataatttgatttcaaatgtgtggtactcgatcattattaatggatctagacaaggttttttctcttcttctcaaggtattaaacagggtgatcccctttccccttccctttttattatagctgctgaagttctctccaggtctcttaataacttgtacaatcaccctgattttattccttttgctatgcataataaggttcctaaagttaatcatttagcctatgcagatgatattgttattttctgtagtggtaatcctaactctattaagcttgttatgaagcaaattggtaactatgaggaaagctctggtcaattggttaacagagacgagttttttcctcattgttcctaagccagcaacagatatgattaatagaattaggaatttctctggctttatggataagaattttcctcttaattaccttggttgtcctctttgtgtgggtagaaaaaagactgaatattttaacatcttgcttagtaaaataatgaaaaggctcaacggttggcaaggcaaactcttgtcatatggtgatattcaaaaatattttgctaactttttctggggtaactcatatatatggctacagcctacaggctacttctctcttttactactcatcttttgtttaagatgtaattaatgcttaaatacaatattactttgttgacgaggtggacataatcttatatatctttgttgcacatggctcgcgagaagctctcaaaagagtgaggggagaacattatcaacagataaagaattgaactgtatcccatgtgtgtttggtacaatatgttaccgatttttataaccaatcaaacgctagcaaatgatccagaaaatgcttttatgatgcaaagcacaatccgcagaatacattttttgaggaaaatgtttttcacccagcaaaatgcacaaggaaaaaacgatgtttttgcactatatgtattctattatctgactttttttagttccgaatgtagatgaattgcaattgatttctccttcttatttgaagaattaacagttatagtaacaactggaggttccaaacatgacaaaccgatttggctttggctatggaatttatcacatctattttcctttttcttgtcacattttctgatgatgaagttgatgaagacgacgatggcttgggtgagcgcgtaagaccacgcctcgctgttactctagccggcttaggcatgtttgatccaattaagtgaggaaaattgagctgagctctcgagccgcggattttgaaagcggcttgatcgtaagccaatgctgcatcttctggggtctcataagttcctagccacaatctcgcacctcttctctcagggtcccttatctccgccgcaaactttccccacggtcgccgtctcactcctatgtaccgcctccaatcttgcggcgcgtttttctcacgcgccaccacaagcccctttctttcctcctcagactcggacttttcttcgagattttgtattgtgtcctcaaagttttcatcccaaagggaggtgttcaagttattttctgctgaaggggagctgccaaaacttgagataggactactaggcgatgcgttatttgaactcatcggcgaaagaatatcaaaaaaatctgaatcattcagaagctgttgctttatggattcgcagattaaaatcagagaaagagaaggttacatgtgctggattcattttcttttctctagagttttggaataaagttttcttgcactcacttactacaacaacaacaacaacccagtataatcccactagtggggtctgggaagggtagtgtgtacgcagaccttacccctaccttgggatagagannnnnnnnnnnnnnnnnnnnnnnnnnnnnnnnnnnnnnnnnnnnnnnnnnnnnnnnnnnnnnnnnnnnnnnnnnnnnnnnnnnnnnnnnnnnnnnnnnnnnnnnnnnnnnnnnnnnnnnnnnnnnnnnnnnnnnnnnnnnnnnnnnnnnnnnnnnnnnnnnnnnnnnnnnnnnnnnnnnnnnnnnnnnnnnnnnnnnnnnnnnnnnnnnnnnnnnnnnnnnnnnnnnnnnnnnnnnnnnnnnnnnnnnnnnnnnnnnnnnnnnnnnnnnnnnnnnnnnnnnnnnnnnnnnnnnnnnnnnnnnnnnnnnnnnnnnnnnnnnnnnnnnnnnnnnnnnnnnnnnnnnnnnnnnnnnnnnnnnnnnnnnnnnnnnnnnnnnnnnnnnnnnnnnnnnnnnnnnnnnnnnnnnnnnnnnnnnnnnnnnnnnnnnnnnnnnnnnnnnnnnnnnnnnnnnnnnnnnnnnnnnnnnnnnnnnnnnnnnnnnnnnnnnnnnnnnnnnnnnnnnnnnnnnnnnnnnnnnnnnnnnnnnnnnnnnnnnnnnnnnnnnnnnnnnnnnnnnnnnnnnnnnnnnnnnnnnnnnnnnnnnnnnnnnnnnnnnnnnnnnnnnnnnnnnnnnnnnnnnnnnnnnnnnnnnnnnnnnnnnnnnnnnnnnnnnnnnnnnnnnnnnnnnnnnnnnnnnnnnnnnnnnnnnnnnnnnnnnnnnnnnnnnnnnnnnnnnnnnnnnnnnnnnnnnnnnnnnnnnnnnnnnnnnnnnnnnnnnnnnnnnnnnnnnnnnnnnnnnnnnnnnnnnnnnnnnnnnnnnnnnnnnnnnnnnnnnnnnnnnnnnnnnnnnnnnnnnnnnnnnnnnnnnnnnnnnnnnnnnnnnnnnnnnnnnnnnnnnnnnnnnnnnnnnnnnnnnnnnnnnnnnnnnnnnnnnnnnnnnnnnnnnnnnnnnnnnnnnnnnnnnnnnnnnnnnnnnnnnnnnnnnnnnnnnnnnnnnnnnnnnnnnnnnnnnnnnnnnnnnnnnnnnnnnnnnnnnnnnnnnnnnnnnnnnnnnnnnnnnnnnnnnnnnnnnnnnnnnnnnnnngactgtttccaatagaccctcggcatccttccttccaagaactccccaccttgcactcacttactagggtttattaattgtggatggacggtaagggttcatatcctacgtctatttatacgcttggcatataattgtagctctagtccctaccttaatttattttcttctggaatttctatgaaagtaccattttaagcacatgtatggtatgctttttagtttttattatcctaacatttgcgtggaataaaataatgtactgatcttcaatttcaagaaatgatatacaatatattccttcttgagatatggaagatgtttgcgcataactagtcatgacattcggtatagggtaaaattgacttatattaagtgatcgattcgtagcgtgacacgtgtaaccgaaaacatgtaaaaagaaaatcgaataattacccgtatcgggaacaacaaatgcagttgacatcggataaaccccgaagggagcatcaacgtgaggatatcgaatatttgtcatcagatatcatttaatgaagaatatttcctggcattaaatggggagcaattgcagagaatatttacgttcatagctcgccattacatattcatcaatgacccatatattatcatttaataagagcttgatcctaggatttattttcctaggtctagctatgaatagtaggcttaacagccattataacacacaaaattctgggcaaaacttatgctacgttccattctcaagctcaataagataattttatttgttattttatattgttcttatttttgtccttggagacaccgctcccgaaaccaaacatgccattttcttcgatttaaccgctaagtcttatttttaatcttatttatttatcattttggatcaaattagttctcttgtctataaactacataacaaatttaattgtactgttttacgggtaaacagtttggcgcccaccatatggcttagacagtagcgtaattgagttgatccttgcgtttattactaacttgtttgattctttattccttagcaagaaatcgaaaatggcagctaacgatgtcaacatcgcacacaacattgaggcacatgagaatctgcctcaacatgaggattcaatcagtgagacccacaacgagggggacgaggtaacccccgtccacggagaacgatacctccgacatgtacgggtgccgactcccgatgatgtgaaagatgaacatgttgcggacacagtaaggatcctaagagaacaatagaaagccatcatgggccacctctcaaggtaggatcaagtcatgacggtacgcttctaacaacacaaacggaatgagtctggttcttttcggtgctcccgcaaatcaaacggttcaaagagttaaaaacaataccccgatgggtgaggtcgatttcgatggtgctagggggaccgatagcggatttggtaatgataacagcaatgatccatttaaaatcgagctcatgaggtttatgagggaaatgaatgagcatgtggataaaaacataaaggagtttcacgcccgaatagaccatatttcgggtgcacccccagttttgaagggtccgtattcgaaaaaagtatactccgatgtcgttcaaatcgagcgcagcactagagttaactccgaagagtttcaagataccggacataccaaagtacgatgggaattcaaacccttaggatcatatcacaacttatataatgacggtgaaatggaatgatttggatcagcatgagatcgagtcgattctgctgaaaaggtttggagaaaccctcatgaagggggccttgacatggtattcactcttacccgagcattcaacagattcttttgaaatgctcgcagattcgttcattaaggcccatgccggagccagaaaggtccaggccaagaagggagacatattcgggatcgcataaggtgagtttgaattgctgcaggaattcatgatcagattccagaaagagaggatgctgctactggccctaccagacgagtgggcagcagaggcattcaccaaaggtttgaatccgaggagctttgacgcctcccgaaagaagaagaaaagcgtgctcgaattccagacgactacatgggcagatgttcataaccgctatgagtcgaaaataaggatagaagatgatcatctcgggttcccgatatcaaccaaggggcgggaccgagacaagaacaaggataagttcaaaggtgagtttgatatagaccagagatcttctaaaggtcgtttcatgccatttgagagaattgaaggacacaacaacaaagggttccagtactcagacaggctggttcctgacagaagaactgaccgaggttggaataatagatcgttgcaggaaaaataggtatcggggacccgagattcctcatatcccaggttgtcgaattacaatttcaacattagtgtagtggagttggtatcgacgatgaggaatatcaaggaggcgcggttcctgaagccaattagatctgaccccaaccagagggatcataatcaagatcaccttattcgaagtggtaggcggtgatatgggctataatataatcctcaaaaggccatggttgcatgagatgaatgttgtgccctcattatatcatcaactattgaaattctcgaccccgaaaggaatcaagcaaataagaggagatcaactggtggcaagagaaatgaacgcaatgttgatttccagtagtaaagggaaggaacctagcaaatagaaattaccgaaatcgacgccttctcccctgaccaatgaagatgagtgcgaggagtcgtcggaatcccaccgggtgctgcgatattttcaagtgctggaggagacggatacaacaaaattcactgcagaagaactcgagcaagtggcgttattcgagaatttattggaaaggaagttccacctaagaacatggctcaatcccgaactcaggtctggatttattaatttccttaaagctaacattgattgttttgcatggtcgcactcagatataacaggtatcctattagaggtggtcgtgcacaagcaaagcctggacctgaactttccactagtaaggtaaaggcaatgcccaatagtcgaggttaggaataggtttgttaaagaggaggtaacccgactacttgacatcggttcaatctgggaggtaaagtatcccgaatggttagctaacatagttgtggttccaaagaaaaataaaacatttttagaatgtgcgtagattacaagaacttgaacaaggcgtgccttaaagactcgttcccaatgttgaacattgatcaaatgattgatgcaacgaccgggcacgagttaatgagttttctcgatgcatactcggggtacaatcaaatcaagatgaacctggaggtggacttgattttactaaagatgatgagaacgtgaactcacaaccatttatgcattggagagatcgttaaatctcgataaaatcaaagacatcgatgacatctcggaccatctaacaagcgtaaaggaagtacagaggctaaccaaaagattggccgttctaagcaggttcatctctcggtcctcacaaaggtatcatcacttcttctcacttctgaagaagaagaacaatttcaaattgtcacgacccaaaatctcaacctgtcgtgatagcacctaacacattagtagacaagtcgacaatcacataacaactatgcatttaaattaaaaacatgatttaataggttcaatagtgaaaagtctcatctacaacaatcccaaaatcttggtgtaatcgagtacatgagctactagaacaatactaaaataaaataaaagaaaagagagtcaaggtctacgggcatcaaagcatctaccttgaagtctatgaacatatactatgaccactccaacaatcatcgcatctagatgtacttggatctgcacatgaagtgcagagtataacatgagtacaaccgacccaatgtactctataagtaacaagactaaccttgggctgaatgaagtgacgaggtcataaagatatagtatgaatcaaaataatgacaacacatatataacaaaataatgacagtaataactcaaagaaacttccatattcagctggtacacagtacagagatttaggcatgctttcaagttcaatagtttaagctcaacaatgataaaatatgccaagtacaactagcaagagaaatgttacatctctattcctacatgtcaaatatgtatgtcaaatataatgtatcacagtgataatgtaacaacccgacttgtcattttgaacatctacgctcctttcaacaatttgaagtcttgaacagcttcgtaatgtgtattatgacttgtgtgaattgtcgtctttggttttcggatgattcagaattaaattgaaagaacaatccttttttagaagcttaaatgaaaagagttgaccgatttgactttttgtgcaaacaactccggaatggagttttgatggttccaatagattcgtattgtgattttggacttagcactgtgtccggatattcattttgaagtccgtagttaaatttggcttgaaatggcgaaaatagaaaatttaaagtttggaagtatgaccggggagttgactttttgatatcggggtcagaatcacattctggaaattgtaatatcttcgttatgtcatttatgacttgtacataaaatttgaattcattccggatttatctgatatgtttcggcgcgaggtttgaaagttgaaagatttaaagttcattaagtttcaattggggtgtgattcatgtttttagtattgtttgatgtgatttgaggcatagactaagttcttatgatgttttaggacttgttgatatatttggttgaggtcccgagggcctcgggtggatttcggatggttaacgaaatttaatttggatatttatagaatgtttcgacgtcgattcttcaagaatatgcggtatcatagtaataaaattagctccaaattcggttttgaatgaagcattagatccatattgaaattacggagccatagcaaaaagaatcgtcgaattcagacatcgtatgagaaagttgtgcccatttccatgtcgagaaaaaacaaaattccgtcaccaacgcccagggtagcatgaggcgctagccctggcactgggatgttttagaggttctggaaacagtgccacaggcagcgccccacgccacctgtggcgctcaaagataaaaaaatccatataaacgggaggttttgccatttttgacaaaaatagagttggggagctcgattttgggcgatgcttagaggcaaatttcaccacacaacttgggataagtgttcttgactcccttgtgattacatttcatgaattaatctttgtttcagcgttagattattgatttttcaagagaaatcagagaaattttctacaattccagaaaatgaatttgggagatttgaacatcgattcggagttggatttgagtaaaattagtatggttggaatcgtaattgaataggttatcggattttgtgagtttcatcggatttcgagactgggccccactgtaaatttttcgagtggagttggaaatttttgtaaaatgttaaattgtaagcattggagtaaattgtgattaatttgcacgttgtttgaattgatacgagtcgtttggcttgaattgaggagataggaaggcgtatggaggttgatacacgcggaatgtaatttatggagtattgtacagcttgctcggtattggatttgacttgttcgaggtaagtaacacttctaaacttggtgctgagggtatgaaccttgaatatgcgtgttatgtgtttggtgttaaggtaacacacatgctaggtgatgggcgtgtgggcgtgcaccgtgtgaattgtaactctgttacttctgtggtactgtgtagttacctgatcttatttgtagccatgaaatctctacttactagagccattgagctgtgatccatgttaaaaaccatgtctaggctacatgtttatttagttgagacccactgaggtcatttctgctattgagttatctgcttacattggatttacatactcagtcatacacattcatatgcatatcatatctcagtctttgctactatttattgatacatcacatcattatttttgggctgattcttctcatgacattgagagcctgagagactggagagattgatgactgagtgaggccgagggccttatggtgaggatgtttatgggatcgggtttcacgccgcaatatattttattaatttatgccatgattggcttgttatagtgcttgggctgaaggagcccctacggagtctgtatatacccccagtgagcacatgtacctattaagtgtgagtgccgagcgattggaaggattgagtgactgtgaggactgagtgagtgggaggactgagtgaaatgacactttgagagtatgcatatggttatattactgagttgcattgtattgacatacacacttgacatacatgcatagagatgcatttttcctcatgttgtacgatattgcgtcattcatgacttcacatactcgttgatatgtaggcatatagatgtattttcctcatgccttttgaaaatgaaacatcctatttgttgttgaaaagtttttgggaaaatcataattttagaaaacatactcatattttggtgattttggtaaacgaattgggttttcgctgatatatttaaaaagcaggcctatttttctggaactgtgaacgagctgaccattttatctctgagctacttattttattacttccattatgttgttatgattttttgttagctattggtgttggaccccgatctatgttccagctcgtcactactttcaacctagggttaggtttgttacttattgagtacttgggatcggctgtactcatactagacttctgcaccttgcgtgcagatataggatgttgatgttactgtgatcgaagatagctggatttgaagacgtacccgctttccggttgtagctgcctcttgtttatggtagccttagatttataaaaatctgtttatgtacgtttcgaacagataatgtatttatttcataccacctttgtaaattctaatcttagaagctcacgatttgtactaccagtccttggggagtatattagagttagttaattattaattgaatcgcattgttgttatttggcttacctagcgggtgaagttaggtgccatcacgtctagttggattttgggtcgtgacagataatcccaagtactcacactctcaaagtactcaatatgtctaactcatttctcactcaacacacataatcactcaacactgtacaggtacttgaatcaatgcccctcaccaaagcacgtgtatataaatcattgtacctacgctcactgctggtatgtcatactccagaggggcagatcccgcccaagcgctaatataaagcttataaggcttgctgcggcgtacatccctatccacaacaatgaataagccaataaggcatgttgcagcttacaaccggattcataataataataataataacaataataataataataataataataataataataataataataataataataataataataataataataagaataataataataataataataataataataagaataataataataataataataataataataagaataataataataataataataataataataagaataataataataataataataataataataagaataataataataataataataataataataagaataataataataataataataataataataagaataataataataataataataataataataagaataataataataataataataataataataagaataataataataataataataataataataagaataataataataataataataataataataagaataataataataataataataataataataagaataataataataataataataataataataagaataataataataataataataataataataagaataataataataataataataataataataagaataataataataataataataataataataagaataataataataataataataataataataagaataataataataataataataataataataagaataataataataataataataataataataagaataataataataataataataataataataagaataataataataataataataataataataagaataataataataataataataataataataagaataataataataataataataataataataagaataataataataataataataataataataagaataataataataataataataataataataagaataataataataataataataataataataagaataataataataataataataataataataagaataataataataataataataataataataagaataataataataataataataataataataagaataataataataataataataataataataagaataataataataataataataataataataagaataataataataataataataataataataagaataataataataataataataataataataagaataataataataataataataataataataataataataataataataataataataataataataataatagatataaaaccaatatggcatattgtggcatgcagtccgatccaccatatcactcacaatacgactttcgggccccaactcagtcatcaatctctctagtctcacaggctcacaaatcgcatttcactcagcccaaacaatgataacataatgcaacagtaatgataaacatagactgatatatgatatgcagatgaataaacatgaccgagtatataattgcagtttaagcaaataactcaatagtagaaataacctcagtgggtcccaacataataagaacatagcctaaacatggtttttaacatgaatcgcaactcaattactctaacacgtaggaatgacacagataaaactcgactagataacaacaaagtactatagaatcaatcgagtcataattaccacggtgcacaccgatacacccgtcacctcgcatgtgcgtcacctgaaaaccaaccatataacatatattccagggattcataccctcagggtgtatgggtgtgcaccgtgtaaccaaccatataacacgtatttaagggattcatacccttaactaccaagtttataagtgttacttacctcaaagtgcgcaagtcaatgatccaacaaacccttgcttcgcgaatcggcctccgaatgactcgaatctagtcacaaacaacttaatataatcaatacaagctatagggatcgatcccgaacgataatgctacgttctttaaaccaaattcaaaaagtcaacctaaaatttcaaccataggcccatgcctcagtatccgacaaacttcacaaaattcgaacacccattcaataacgagtccaaccatacctaaatcattcaattctaactaaaactcgaccatcaaatccccaaatcttactttccaatacctagtccaaactttctaaactttcacctcaaaaacacacgatctaggtgggaatatcaatgggtattcaataataatggacaaaagtgatcaaaagtcacttacctcttgagttatagtgaaatccctctcaaacatcacccctagccgagctccacaactctccaaataagaaaaaccacgataccctttgaaatataacacttccagtcaatccacacctgcggtcacttaaccgcaactgcggcactagaccttctagtccacttccgcttttgtggtcaaatatgttcttttacgcacgtgcacctgcgccaaaatgtccgttttttgcgaaaaccatgaccatactacactccgcttctgcgctccacttcccgcatctacgagctcacagatgcggactaaccttggcacatgcgcatcccccatccccccagcattttctgtacctgcgatagcctgaccacttatgtggtctcgcacctgcgaccaaatcctcccaggtgcatttgcaccacttgcaaatctttagcatttcctcaattcaaaacatcaatccaatttcaatctgaatcattcccaaggcctgcgggaccccatccaatcataccaactcatcctgaaacatcataagaacttagtcaaagactcaaatcacatcaaacaatattgaaaacacgaatcacaccccaattcaagcctaataaaactaatgtatttccaacttccaaaactaatgccgaaacctatcaaaccaattccgaataacctacattttttcacacaagtcataaataacacaataagcctattctaacttcctaaatctaaatccaagcccgataccgacaaagtcaactctcaatcaaacttctcaactttccaacttttgccaattcaagccaaaacgacctacggacctccaaatcaatatctagacatactcctaagtccaaaatcaacatataaagctatcgaaaccatcaaaattgcattatggattcatttactcataagtcaacatcgggttaattctttcaacttaagcttccaactttgggactaagtgtcccaactttggaagagggctcaacttgcccttcttcccgaacctcatagcactcttcatgggtgaaactctaagtaataccttctctcccaccatataggcaacatcacaagccttatgatcgatgtaacacttctatctagaatgtaccgtgcgaagctgatcctaaatcagcttgaccttttccaaggcatcttgaaccagatccgtgcttaacaacctagcctcccctggctcaaaccacccaactggagatcgatatcgccttccatataatgcctcataaggagccatctgaatactttattggtagttgttgttgtaagcaaactctataagctgtagaaaatgatcccaagaacctccgaaatctataacacaaacacgtagcatatcccccaatatctaaagggtgcgctcggactatccgtccgtctgagggtggaatgttgtactcaactcaactcgtgtgcccaaatctcattgcactgctctccaaaactgcgatgtgaattgcgtgccctgatcagaaataatggacaccgacacactgtgaaggcgaacaatctcacggatatagatctcagctaacctctccgaagaataggtagtcatgtccggaatgaaatgtgcggacttagtcatccagttcacaatcacccaaatagcatcaaatttcttcaaagtccgtgggagcctaaaaatgaagtccatagtgagacgctcccatttcctctcaggaatatcaagcctctaaaaaaaactgcccagcctctgatgctagtatttcacctgctgacaattcaagcaccgagccacatactccactatatctttattcattcttctccaccaatattgctgcgtcagtcctgatacatctttgcgtcacccgaatgaatggaataccgtgaattgtgggcctcctcaagaatcaactcacataacccatccacattgggcacacaaatccgaccttgcatttgcaacaccccatcatatctaatagaaacctccttggcatcaccgtgttgtaccgttccctgaaggacaaacaaatgggggtcgtcatactaacgctctctaatgcgctcaaataagaaagaccgagaaaccacgcaagctagaacccgactaggctcctaaacatctaacctgatgaactgatttgccaaggcctgaacatctgatgcaagcgatctcttaccaacaggaatatatgcaaggctacccatactcaccgcttttctactcaaggcatcgaccaccacattggccttcccgggatgatataaaatggtaatatcatagtcttttaacagctccaaccatctttattgtctcaaatttagatccttttacttgaaaaagtgttgtagactccgatgatatgttaatatctcacaagacatgtcgtagaggtactgtcaccaaatcttcaatgcatgaacaatgactgctaactttaaattatgaacagggcagttcttctcatggggcttaaactggcgtgaaacataagtaatcaccctaccctcctacatcaagaaacactcaataccaatccgagaagcatcacaatacacctgatatgaacctgattctgaaggtaaaattagaactggagctgtggtcaaggtagtattgatcttctggaagctctcctcacacttataagaccacctgaatggggaacccttctcggtcaatctagcaaaggtgcataaatggacaagaaaccctccacaaaacgacgataatatccggccaagccaagaaaactccgaatctcagtagctaaagacggtctgggccaaatctgaattgcctcaatcttcttcggatctaccttgatcctctcactagacatcacatgtcccaagaatgccacttaatcgatctagaactcacacttggtgaatttagcataaaacgtcttttccctcaacgtttgtagtacaatcatcaaatgttgcacatgctcctcttggctacgtgagcacaccatgatatcatcaataaatactatgacaaaagaatcatgatatgactggaatacattattcatcatatgcataaatgttgttggggcattaatcaacacaaaagacatcataaggaactcatagtggccatagcgggtcctgaatgctgtcttcaagatatcagaatctcgaatcttcaactagtgatacctagacctcaaatcaatcttagagaacactctagctccctgaagctggtcaaataagtcatcaatatgcgataatggatatttgttcttaattgtaactttgttcaacttcctttaatcaatgcacatctgtatagtactatccatcttcttcacaaacaaacccggtgcaccccaaggcgacacactaggcctaatgaaccccttatcaagaagctcctgaagtttcattttcaattccttcaactctagtggtgccatatgatacagaggaatataaatgggctgagtgcccggtactaagtcataaccaaaatcaatgtccctgtcgggtggcatgcccaacaggtctgtaggaaacacatctagaaagtctcgcactatcggaatagaataaatggtaggagtatcagtaccaacatccctcacaaaggccaaatatgcctaacaccccttcccaaccatccgttgggccttcaaatatgaaatcactctactgggaacatagtccaaagagcctatccactacatcctatgcaaccctagcatcgcaacgtcatagtcttagcgtgataatccaaaatagcatgacatggggacaaccaatccatgcctagaatcacgtcaaaatccatcatactaagaagtaaaagataaaatctcatctccaatcccctaatggtcaccacaaatgactgatacacacaatccacaacaatatactcacccaccagcgtagatacaagaacaagcgtaactaaggactcacggggcatatccaaataatgagcaaaatatgatgatacatatgaatttgtggaaccagggttaaataatatggaaacatcctcgtggcttactgaaacaatacccatgatcactgcgttcgaagcaacgacctatagcctatcaagaaaagcatagcatcgagccttaccaccacgtgatcggcctccccatctagggcggcctctagctgcctaagccccatcttgtgttggctgagtgggtggtgatgtaactggtacaaaagtcatagctcgacctctttactgaactgtacatcccataagacaaggacaatgcctccttaaatgccctaaatctccacactcaaagaaactctgatctgtcaatggcagtagggactaaatcggacaccgagaatcaaaataaccactagatggatctggtacagataaaccctgaactaatggagaacaggatgaactctgagctgggagggcattgatgactaactaggacgagcattgtatgaaccatggctagctaatgcaccacgatgaacatgacgagtcatcttagtgggcctatagggatgacccctgttgtagtgggactgtcctccatatgagacactgctaaaactacccaaaccacgaggcctcttggactctctctccttacgctcctgactacgaacctgctctaggcatctagcaatatcaaccacctcgtcaagcatcgcatccaatgcaatctctcgagtcatggtgaagtgtagtccataattgaggccagcaatgaacctcttaatcctctccctctctatgggaacttaccataccgcaggatgagccaactctaaaaatcgcatcttatactggggaactgacataccctcttagcatagctgatcaaactgcctctgcaactcttctttgcgagtctgtggaacaaacttctctaagaagagaactgagaactcatgccacgtaagtggtgcagcgtggctggcctgctcaactcacaggcctcccaccatctgtaggctatccctatcaactgaaaaatagtgaataaaaccccactagtctccaaaatacctaccgtgcgtaggattaactagcatctgtctataaaatcctgagcatcctctggctcggacccactgaactctggaggctcaagcctcccaaactgctctagtctcttcttctcctcatcactcataggtgggccaacctaggcccaagagaatgaaatcgattagctggtagtacccccggtgtctggagtccttaatctaccttctctggagtacgggcggcgggagtctaagcacctcccctggcctaagaagtagctagtgcggtcggaactgaaactgcttgagcaaggcaagtgcatacaatcaatatctgggccaaagccttttgaatgccttgagtcataatgggcataactggtgcatgagttgctcccaccggctcgaccacatctggtacctactcctaagatggagcaattggtgggtccacatatgctgctctagctgcagtacgagctggaccttggcctctaccatgaacccggtcttttgcggccctagatggtagtattggtggctatctgcctgatctagtctaacatgtcctcactatctgtaagagaatagaataatagaaatttagtttccgaaattaacaaacccgcacgacaagaatacaagaaaatgaagtttcccaatgattcggtagcctctcgaagataagtacagacgtctccataccgatccgcgagactctactaaacgtgctcatgactcgtgagacctaagtaacctagtgctctaataccaacttgtcttgacccaaaatctcaacatgtcgtgatggtacataacacattactaggtaagccgacaatcacataacgactatgcatttgaattaaaaacatgatttaataggttcaatagtgaaaagtctcatatataactgataaaaacaactacaactcagctacaacatacctaaaatcctggtgtcaccgagtacatgagctactaagtgtcaacatagtctgaaactctagtacaacaatctgagaaaaatagaacaatactgaaataaattggaagtaaggagagtcaaggtgtgcgggcgtcataacagctacctctaagtctccgaatatgtactatcaccactctagcaatcaccgtgtctagatgtacctggatctgcacacaaagtgcagagtgtagtatgagtacaaccgacccaatgtactcaataagtaataggactaaccttgggctgaaagcagtgacgagctcagaaagatatagtccggatcaaaataatgacaacacatatataataagataataatggtaataactcaaagaaacttccacattaagctcgtacatagtacatagatttaggcatgctttcaagttcaccaagttaagcttaacactaataaaaaatatgccaagtacaactatcatgaggaatgttacatctctatgcctacatgttaaatatgcatatcaaatgtatgtatcacattgataatcctaagtactcacactctcagagtactcaatctgtctaactcatttcctactcatcacccacaaacactcaacattgtacgggtgcctggcattaatgcccctggagaggaggatccttcccaagcgctaactgctatgtcagactctggagaggaggatccttcccaagcgctaatataaagactataaggcctactgtggcgtgcaactcaatcaaaaataatcaataagctaataaggcctgttgtggcttgcaccccgatccataataataatagatataaagccaatatgacatgctgcggcgtgtagcccgatccaccatatcacttataatccggctcttaggccccaactcagtcatcaatctctctagtgtcatgggctcacaaatctcatgtccatcagcccaaacaatgataacatgatgtaacagtaatgataatagagactgagatatgatatgaaaatgaataaacatgaccgagtaaataattgtagtttaagaaaatagctcaacagtagaaataacctcccaacagaataagcacatagcctaaacatggtttctaaattgaatcacaactcagttactctcacacgtaggaattacatggataacacaaaactagatagctacacagtaccacagaatcaatcgagtcatacttaccacggtgcacgcccacacgcccttcacctatcatatgcgtcacctcaacaccaaccatataacacatattccagggatttataccctacgtataacttttagaagtgttacttacctcaaagtcgtaattcaatgctcaaacaaaccattgcctcgtaaatcgacctcagaacgactcgaatctagtcacaaacaaattaatataatcaatacaaattataggaatcaatcccatatgataaagctatgttctttaaccaaattcaaaatgtcaaacccaggcgcacacctcgaatcccgacaatccaaaaattcgaacactcattcaataacgagtccaaccataccaaaaccattcaattccaaccacaaatcgaccctcaaatccccaaatcttactctccaatacctagtccacaattccccaaatttcacctaataaacacacaatctaggtgggaatatcaatgggtattcaatattaatggacaaaagtgatcaaaagtcacttacctcttgagttgtagcgaaatccctctcaaacatcgcccctagccgagctccacaactctccaaatgagaaaaaccaccaaacccttcgaaatataacactgccagtcaatccgcacttgtggtcattttatcgcatcttggccctagaccttctagtccacttccgcttatgtggcccatgactatactgcgctccactataaggcctaatgcagcgtacatctcaatccacaataatcaataagctaataaggcctgctgctgctcgcagcccaattaataataataataataacaatacatataaagccaatatgacatgttgcggtgtgcagcccgatccaccatatcacttataatccgtctctcaggccccaactcagtcatcaatctctctagtctcacgggctcacaaatctcatgtctatcaacccaaacaatgataacatgatgtaaccgtaatgataaccgaaactgagatatgatatgcaaatgaataaacatgaccgagtacataattgcagtttaggaaaatagctcaacagtagaaataaccttagtgggtcccaacagaataagcacatagcctaaacatggtttctaaattggatcacaactcagttactctaacacgtaggaattacatggataaaacaaaactagatagctacatagtaccacaaaatcaatcgagtcataattaccacggtgcacgcccacacgcccttcacctatcatatgcgtcacctcaacaccaaccatataacacatattccagggatttataccctccgtacaacttttagaagtgttacttagctcaaagtgcgcaattcaatgttcaagcaaacccttgccgcgcgaattggcctcagaacgactcgaatctagtcacaaacaacttaatataatcaatacaaattataggaatcaatcccatatgataaagctatgttctttacccaaatttaaattgtcaaacccaggcgcacgcctcgaatcccgcaatcaaaaaatcggaacacccattcaataacgagtccaaccgtaccaaaaccgctcaattccaaccacaaatcgaccctcaaatccccaaatcttactctctaatacctagtccaaaatttcctaaatttcacctaataaacacataatctaggtgggaatatcaatgggtattcaatattaatggacaaaagtgatcaaaagtcacttacctcttgagttgtagcgaaattcctttcaattatcgcccctagacgagctccataactctccaaatgagaaaaaccatgaaacccttcaaaatataacactgccagtcaatccgcacttgcggtcatttaatcgcatcttggccctagaccttctagtccactcccgcttatgtggcccatgactatactgtactccgcttctgcgctccacttccagcatctgcgagctcgaagatgcggactaaccttttcacctgtgcatcccccagcccccagcattttctgcacctgcgatatcctgaccgcttctacggtctcgcacatgcgaccaaatacacacaggtgcgattgcaccagacttgcaaatcttcaacatttcctcaagtccaaacatcaatccaatttcaatatgaatcacttccgaggactcggggaccccatccaatcatacaacacatcataaaacatcatacgaacttagtgaaaaccttaaatcacatcaaacaataaagaaaacatgaatcacacctcaattcaagcctattaaaactaatggatttccaacttctaaaaccaatgccgaaacctatcaaaccaattccgattgacctaaaattttacgcacaagtcataaatgacataacagacatattccaatttctgaaaccaaacttcgggcctagtatcaacaaagtcaactctcgatcaaacttctcaactttccaaaccttcaactttccaactttcgccaattcaagccaaaacgacatacgaaccctgaaatcaatatccatacatactcctaagcccaaaatcaccatacgaagctatcataaccattaaaactctattttggagttgtttactcataagtcaatatccggtcaaccctttcatcttaagcttccaacattgggactaagtgtcaatttattccaaaatatccccgaaaccaaaccaaccatcctagaaagacaaataactataattgaacataggatgagtaataaatgggggaacgatgctacaatactcaaaatgacttgctgggtcattacacgaatagactccaaaatgtcagcaggccttaaaagacctgaaacgttatctatcaagccctccactactatcaaactaggggaaggtgaacaattactgataaatctgatggtctcagaagtagtggtaaatgtcgttttagtccaagaagataaaggtatacaatttcctatctattatgttagtaaaattttctcaggagcatagactcgctattcgaaccacaaaaagttgaccttagctctcgtagtcgcctctcgaaagcttaggccttattttcagtgtcacccaatagccgttatgataacttttcccttgtggaatgttcttcacaagcctgagttgtcaggccgattggctaaataggcaatcgagattagtgagtttgacattgagtattaacccaagactgtaataaagttacaggttctgcccaacttcgtggctgatttctatcccgggttaatgcttctagctgctaaagagggagtgttggtgtgagaaatgaaattaggactttggaccttcttcatagatagagcttccaatgtgaaaggatccaggcttggggtggttctaatcatgccctcagggaaaccctgagacaggcaattaaaattgttctgttaactaacaatgaaaccgagtatgaggcttttgttgcaagactcaaactggcccagggacttggctctgagcttatatagatcaaatgtgattcccagctggtagtaaaccaagtgtatgggagtttcgacctaaaggaggaatgcatgcaacaggatgtgattaaaagacattgctcacacgattaagggagtggtcgatcacacacatcccaagagaagagaacgtagaagtagatgcattggccaatttggggtcatctatggagatggaaggatctaactccggtactgtcattcaacttatgcactcggtgctagatatagctggctattgtgaattaaatacaaccaacctagtctaggactggagaaataagttcatcgagtatcatcagcatggcaagttgcccgaagacccgaaagtgtcccgatcactacacacaaaagcggctcgttactgccttttgagagggaaattgaataggagatcataccaaggtccgttggcctgatgtctaggagccccgagagcggactacttgatgagagacgtccatgaaaggatttgtgggaagcattctgctgcagattcgttggcactaaactggttagggtaggatatgactggccatgaatggaacaggatgcaaaagcgttcatttagaaatgcgacaaatgccagtgctatgcacagttggttcatgaaccgaaagaactcttgcaatcggtattttccccatggcagttcatgaaatgggggatatatatatagttagtcagcttccaccgaatcccacaaaagtaagattccttttaattttaaccgattacttcactaaatgggttgaagtaggtcctttccaaaagatcggtaagcgtgaagtgatcgacttcctatgggaacacataatttgctggtttggaataccaaaagagatttcctgtaataacggaccatagttcataggctcaaaagtcacaaaatttctcgaagatctaaaaatcaaaagaattacctcctcaccataccattcgagcgctaatggacagtttgagtcaaccaataaggtgattatctaaaacctaaaaaagaggtttgaagctgctaaaggaaagtaggccaaagaattaccgaaagtgctatgggcataccagacaacataaaagtcaagcaggggagagacgcctttctctctcgtatatggcacggaagctttaattttggtggaagtaggggaacaaaccttatggttgtcccgagaaaatgaagaaataaataacgagacatcgttggcgaaactggatctgcttgatgaacccagggacttggcacacgtgaagatagtggctcagaagcaaaggatggaaagatactattatcagagagccaatcttcattacttcaaaatcaggagttggttttaaggaaattgacccagaacactcaggaaatcaacgttggtaagctaggtctaatctgggatggtccctaccggattttggctatcaccgataaaggatcgtataagatggaaaatcaagatatagtcaaattgcccagcaattggaacgtaactcatctcaaaagatattactactaatggatgctatcaaaactgaaagtatgtgctgtacttgtttttccttcgatgagtttttatcccaatcgggtttttctggcaaggtttttaatgaggcaacaacgaaacacatactatgagaggagcaacatcggcaaagacctttaaatgacaaggcattgaaacaataaaccactatgggatggttaaataatctttggctcgatggaaagttccaaatggtaagctaagtttgccatcgaacaagattgccatgagaaccaggaactacgagaaccgggaacaataatgtctcatcggcaccagaaattacatggccagccccgaagaaataacttgtacaagttagccaaatgtattggcattttactagcaaacgaatgcttatatacttttgaagacaaaaggaataaaataaagtccttttattttaatcttgtttcttgtccaaacgatgagttgattttatcatttgaaagttaacaagaaaatttcaatacttatgccggaatgaacaagagacgccctcttcaagagcaccttaaacataagagggccctctcttatgaaaccctcatagtaaagggttgatttcggaagaatttatgcctagaacaaaaagttattagacgaaaatacactcgaagccttatctaaattcgacacaaaaagaataaactttgcgcaatacaacaacaacccagtaaaatctcactaaatcaaaagccttctttatttatcaaaatgccaaacgacataagtacaaaaatacaaaagaaaacaacaaaagaaaagaagaaaaaatctacatattaccgccgccagaactcggggggagagaggcatctacgtccctgggggaagtgggcagatcaaccaccggttcaggtcctgggctgtcacgacccggaatccctacctcggggtcatgatggctcctaacatctacttgttaggcaagtcagaatgaaaacgatataagtatgaagtatagtaaaataatactgaacaacgaagtcttaccatagcctagaagttggtgtcacgagtacatgaacatctagagtgctacaaatatggtctgagtaaaatccactattttgaaactcagaaaacaataaatgtaggagggaaggggacttcagtgctacggacgccatatagatttaccttaagtctctgttagagactgaatccgagcaaaagctactgaacaccgctaggagaaactactgtatttgtacaagaagtgaatagtatagtatgagtacatccgaccacatgtactctgtaagtaccaagcctaacctcgacgaagtagtgacgaggctaaagcgggccacttacaataatctatacgcagtaataataataataacagggaaggaaagcaggaaatggaagtaaagcaattaatttgcgaaaaatgaactcggacctcactattagaaagcctaaaataacaagtcccttaatctcatatcaaaatgctgaaatagatacaacgacaacaagtacaacacacacaattcgttgcggtgcgtaacccgatcctaccatatcattctttatcaatatcaattaccatgtatacaatccgttacggtgcgcaaacccatcccaccatatcatcatttatcaacatcaagtatccgtataaaattcattgggacgcacatcccgatcccaccatatcatcatttatcaacatcaagtatcctcccttattccactgtttcaattcattatctttcaatttccgttgcggcgtgcaacccgatccccgaacaatttcaaataacataaataatccaataactcaatttacaagaatttctacatcaaagagtaaaactgcaaggtaataaaggaccacgtaataatcaagaatccttaaaattcaaagtttctactttgcaagtttatcggtgtctaacacactcaacgattcacgcaaatgaaactacatcttagaatgcaacaagtattacaaagataatagtacaagtaaagcatgtgacaattaaggcgtgcaagcaaaataattaaggcaattagcaaatatgcacagagtcatggaagggacgaacaatttaatacaataataattaaatgacaaataacaattatggcatagaagtcaaataatgcatgtaagaattaaggcatggaataagataatttaagaaataagagaaaacatggaaacacttatcacctcgcatatacaccattttctcacataatccacacaacacatagttcaaaaatttctaattccctcaagtcaaggttagatccaagcctcactccgcaatcaactcaaagctcaaccagggtatttcttctaaaattcgcctccaaaccaatcaaatcaaatcaaatatagttcaaacaattcaaattaagctttagaaactatgcacgagtgaaaaatattcaatttttaagacctcgagcagctttgtaatacgtattatgacttacgtgtgtggtcaagtttggttttcggaggattcaggatcaaattagagaacaattcttatttaagaagcttaaaaataaagagttgaccggtgagttggcttttgagcaaacgactccgaaatggaattttgatggttccaatagtttcgtatggtgattttgaacttaggagtgtatccggatagttatttggaagtccatagttgattttggcttgaaatggtgaaagttacaaatggaaggtttggaagtttgatcgagagttgacgttggtgatatcggggtcgtaatttgatcccgagagttgtattagctctgttatgtcaattggaatttgcatgaaaaattttacgtcattccgagttaatttgatatatttcggcacgtgttttggaagttggaagatttaaaaattcatgagttccatttgtggtgcgtttcgtagtttcgacattgtttgatatggtttgaggcctcgagaaagttctcgttatgttttagtacttgttggtgtgtttggttgaggtctcgggagcctcgggtgtgtttcagggcgagttttgaacatgtttgggaattttggcactctcatgatcttctgggaacagttggagtgtgggggcacattttggagagctgaagcaaagcctcatgtgcggaccaaagaggaaatatgcggaccgtagatttcctcttacggccgcagataggggattctgcaggttcgatggtatcactttggaagcttgtatctttaaatttacaaggaatttgtagatgcgccaaaaactaaagttgtagtcctttgagtctggttttcgaaaaggtaaaccaatcatcatttggacatttgtacccaaagttatggtcaatttactgaagcctgctagtgtagtggctgttaaagtgcgactgcataatttggattgcgaccgcacaatttggattgtggccgcagaacttggaatatgcggtcaacactttaggagatcagatagttaccatataaataagggtttcatctcatttttcatttttggactttgggagctcggtttgtggcgattgttcttggccttttcaagaaattcatcggggtaagtgattctaactcggatttggttaatatacatgaatatatcattgttttcaatatttaattagtattttgagatgcaattgggggaaattatttaaatttcattaaacaaatttttggaatttgaaaggcgatctgatgtcggaattcgattatttttgtatggttgaacacatatcggaatgggtgttctgattccgtgaatttttctctagttccgaaatatgggccctacattgacttttggttgacttagcattattatccgaattttttttctatgaatcgtaactaatgtataaaaatattttgattagattggagctgtccgaacgacgtttcgcgcaagaaggctattttgggatatcggcctaactccgttaaggtaagtgtcttgtctaattttgtgtggttgaaaccaccccttaggatttgagatgattgtgtcattcgtgttatgtgaaggtcgtgtaggcgagttgacgagtgggtacacgacctatatgtggtatttgaccggtttggaccgttaggcttcttttatacaattgattgtaaatatcgttttatgattatatcttttgttgttagaattgtttgtacgtgctttacttgaaattgttagcacatgttccatccttgttgtcaagttcacccttgtatgctaatatttgattgtaatcactcgttgaattcatgctttacctgctacatgccttaattgtcaattgatgcccataaattgtgccttggcttatggattgtcatttccttgctatttcatttcgtgagctatcgtgtatcatttttcattagttgcgacttctttgtgtagcctcgttatttcttttgattttgtggtataccgcaatagatattatttaataatgagagggatcaggttgtatgccgcaacagatatgatttattattgtgagggatcgggttgcacgccgcaacaaatatgatttaatattgagagtgatcgagtttcacgccgcaatagatatgatttattattgtgagggatcgggttgcacgccgcaatagatatgatttaatattgagagggatcgggttgcacgccgcaacatatatgatttattattgtgagggatcgggttgcacgccgcaacatatatgatttattattgtgagggatctggttgcacgcggtaacagatatgattattattatgtgggatcgggttgcatgccgcaacatatatgatttattattatatgggatcgggtttcacgccgcaataaatgtacaaatatgaaattattgtgatattaaagttaattttgattttgattcttacgatgcatttcatgctaggacggttactacgatttcttaaatcacctcattgtattttgattataattaattaaccgtcaatatattaaaaatggaaaaatatggacttcttgtgtgagtcatgcatcatatgtgatatgttaagttgttttgaatttaggagaggtaaatgaaagaattttcaagttgttccacttgtgtgtctttcaaaaataaaactaatatcttattcgaagatctactaatttaaatggtgattatatttttactctaattgatacctcaacttcctcattatcttattgtcgtgtaatttatgtgaaaaattnnnnnnnnnnnnnnnnnnnnnnnnnnnnnnnnnnnnnnnnnnnnnnnnnnnnnnnnnnnnnnnnnnnnnnnnnnnnnnnnnnnnnnnnnnnnnnnnnnnnnnnnnnnnnnnnnnnnnnnnnnnnnnnnnnnnnnnnnnnnnnnnnnnnnnnnnnnnnnnnnnnnnnnnnnnnnnnnnnnnnnnnnnnnnnnnnnnnnnnnnnnnnnnnnnnnnnnnnnnnnnnnnnnnnnnnnnnnnnnnnnnnnnnnnnnnnnnnnnnnnnnnnnnnnnnnnnnnnnnnnnnnnnnnnnnnnnnnnnnnnnnnnnnnnnnnnnnnnnnnnnnnnnnnnnnnnnnnnnnnnnnnnnnnnnnnnnnnnnnnnnnnnnnnnnnnnnnnnnnnnnnnnnnnnnnnnnnnnnnnnnnnnnnnnnnnnnnnnnnnnnnnnnnnnnnnnnnnnnnnnnnnnnnnnnnnnnnnnnnnnnnnnnnnnnnnnnnnnnnnnnnnnnnnnnnnnnnnnnnnnnnnnnnnnnnnnnnnnnnnnnnnnnnnnnnnnnnnnnnnnnnnnnnnnnnnnnnnnnnnnnnnnnnnnnnnnnnnnnnnnnnnnnnnnnnnnnnnnnnnnnnnnnnnnnnnnnnnnnnnnnnnnnnnnnnnnnnnnnnnnnnnnnnnnnnnnnnnnnnnnnnnnnnnnnnnnnnnnnnnnnnnnnnnnnnnnnnnnnnnnnnnnnnnnnnnnnnnnnnnnnnnnnnnnnnnnnnnnnnnnnnnnnnnnnnnnnnnnnnnnnnnnnnnnnnnnnnnnnnnnnnnnnnnnnnnnnnnnnnnnnnnnnnnnnnnnnnnnnnnnnnnnnnnnnnnnnnnnnnnnnnnnnnnnnnnnnnnnnnnnnnnnnnnnnnnnnnnnnnnnnnnnnnnnnnnnnnnnnnnnnnnnnnnnnnnnnnnnnnnnnnnnnnnnnnnnnnnnnnnnnnnnnnnnnnnnnnnnnnnnnnnnnnnnnnnnnnnnnnnnnnnnnnnnnnnnnnnnnnnnnnnnnnnnnnnnnnnnnnnnnnnnnnnnnnnnnnnnnnnnnnnnnnnnnnnnnattattacgttttactttaataaatcccatatttatatcgttaaaatttgattgaatgtcttaatttgtataaatgtaatattatattggatctcatatatttctaaactaaactcatttgatattctatttgcacaacctctccactattttaccttatttaaatcctaaattggcttaataactcatttgatgctttactatgttcaagttggaattgttcttaattgtgtttaaattattcatcatttcatggtaaggacgagagtaaaagcacgaagggtgatgctatgatatttttatattatatttgtactctaactgtgttgttacttaaatgcttgattgtttgctcgatgccatccgtgttctcattattttcattgttaatttgtattgaaaattcttctacgattggccttacattgatactcattccttgttatcttcatgtaacatattgtacaactttatatgtctggtatgtgtcttgacatggcctcgtcactactctaccgaggtaaggcttgatacttactgggtactgttgtggggtactcatgctacacttctgcacatctttttgtgcagaaccaggtacccctagagttattgatattcttgttagttgatcgagcattgtggtggagactcaaggtatactcgttgtctcattcgcaggctttggagtaacgtgtgagctttaaacacacactaaaatatgctcgctagtcgagtatagtataatataatatcgtatccatagggattggagttaaatagtattatcgcagtttgtagcgatattgctatctaagataatcaacagtttagaattatgtgattaaaaattaaaattaactaagaatctaaagctatttgacaaatgacaatcgaaacaaaattaagcaaagaagatatcaatgggagaaaatatgggttgattggataggtgcaagataaatgtctgggatttaactctagttgattcacttctaacgttaagtgagttcgaattcactcaataattagttcaaacgtttagtagaaactactctctcgattaagtctcaacctcacaatgtgaaccaatttaagctcgatgaagatatgcaagagttagtagtggattggcatttaggagaacctctatcgattatcctcctaattaggtctaaaaaataattctactagcctcatccgattactaagaagaattaatgaattcaaccaacaagataatgcaaagatatcataagtatgcctctattgattacatgaacatgtgtatatatatgcaacaattaaaacacccaaaacgattcaatacattaaaaaaaactagagttaatatccacaaacaaatatcaatacaccaaatccatcaatccctaaagaagaactactccatagatatggagtaattcatcacaaatataaagataaacataaagcgagccaaactcttgtcttgagtgaggattgaatgatgaatccctttttgcttttgcttttccacctcctcattagcttccttaggtctaagatgtgtcaaaagtcccaaaattaatgttttccatgtatttatactaagtagggtcgggcccggacgaaaataccttttcctacacaaatttcaaaaatactctgtaaaacatgtacaggcacgccgcattgggcgacgcgctaggcggggcggttgtgggaaaatcgagatagctgatttttccactttgcagaaattttgcactagcgctatgaggcccgcggggcggtagtgtaattttctaagagtgaattcattttctcatttttttgatgttcagagttggttttcgacccccgaacgcgatcccggcttaatcccttggacttttactcagacttcaaagctccaaatcacttgaattagctccataacattcacatagctcgaaatcctcctacaaggcacaaaatacaaaattagtgcgaaacataagtgattaaaactcaatctcaattaaagtgcagtaagttagagtgtaataggcgactaaaacacaagattataacctaccatcaacacaccacacttaaaccattactcgtcctcgagcaatcaaactacactttatatagacacgaccttattaaacaactctcctaactcatcacaccaagaataattaaaatagaataagcacaatagtgtaacatcttcacctccatatttgactaacaagtaccacgcattattaataacctgctcacttactctaacacagagatcaatgacattacctttccttcatgaatcaagtgccctcacaacaatagaaagtaattccacacacaataaactttaagaacaattaggaactcaagatagaaagaattcactcactctcagaaacaacattcatatgccacaaaagatgaaccataggcttgccnnnnnnnnnnnnnnnnnnnnnnnnnnnnnnnnnnnnnnnnnnnnnnnnnnnnnnnnnnnnnnnnnnnnnnnnnnnnnnnnnnnnnnnnnnnnnnnnnnnnnnnnnnnnnnnnnnnnnnnnnnnnnnnnnnnnnnnnnnnnnnnnnnnnnnnnnnnnnnnnnnnnnnnnnnnnnnnnnnnnnnnnnnnnnnnnnnnnnnnnnnnnnnnnnnnnnnnnnnnnnnnnnnnnnnnnnnnnnnnnnnnnnnnnnnnnnnnnnnnnnnnnnnnnnnnnnnnnnnnnnnnnnnnnnnnnnnnnnnnnnnnnnnnnnnnnnnnnnnnnnnnnnnnnnnnnnnnnnnnnnnnnnnnnnnnnnnnnnnnnnnnnnnnnnnnnnnnnnnnnnnnnnnnnnnnnnnnnnnnnnnnnnnnnnnnnnnnnnnnnnnnnnnnnnnnnnnnnnnnnnnnnnnnnnnnnnnnnnnnnnnnnnnnnnnnnnnnnnnnnnnnnnnnnnnnnnnnnnnnnnnnnnnnnnnnnnnnnnnnnnnnnnnnnnnnnnnnnnnnnnnnnnnnnnnnnnnnnnnnnnnnnnnnnnnnnnnnnnnnnnnnnnnnnnnnnnnnnnnnnnnnnnnnnnnnnnnnnnnnnnnnnnnnnnnnnnnnnnnnnnnnnnnnnnnnnnnnnnnnnnnnnnnnnnnnnnnnnnnnnnnnnnnnnnnnnnnnnnnnnnnnnnnnnnnnnnnnnnnnnnnnnnnnnnnnnnnnnnnnnnnnnnnnnnnnnnnnnnnnnnnnnnnnnnnnnnnnnnnnnnnnnnnnnnnnnnnnnnnnnnnnnnnnnnnnnnnnnnnnnnnnnnnnnnnnnnnnnnnnnnnnnnnnnnnnnnnnnnnnnnnnnnnnnnnnnnnnnnnnnnnnnnnnnnnnnnnnnnnnnnnnnnnnnnnnnnnnnnnnnnnnnnnnnnnnnnnnnnnnnnnnnnnnnnnnnnnnnnnnnnnnnnnnnnnnnnnnnnnnnnnnnnnnnnnnnnnnctattaatcaagctcattcagtcaaggatcaagtaggactttaattggttgtaatgtagttgcgggacgggtatgatacatttagatgtaagagtgactaaacctccctaagcacttcaatacttacaattccattgttcaaaaccccacacttatgtcaaaccataactccaccttcacattaatatacattaactcccaacttcaagatttaccactatcatggaatattttgcacaacaatacaattattttttctttctctttcaattaaagtggctcttactttttcaaaacattgcacctttctccttatttcattatttccgctcaaaagccaaaccaaacaccccatacttcaacttttacaaagttcataaaatatttaagtgctcgtgagaggtacaaggttaaaatagatgatcaattcaatcaaatgggtagggcttgtaatgtggttgccaaagaaataggattacaagctcaaaggggttaactaagatacataacaattagctggataatagcatataactggctcaacaaagaaacgcctatatcacgtccaagagtgaataaaactactatttcgcgttgcaaacacacggggtaagttctagacatcaaatgcaatgcatagaatacaccaaaacccttacacacatggcacataactcactcaagattggactatcaaggtactctagtcaaagaaattaagcaaagctaaacttatacaatttaaggtacttatacaagagtcaaaaactgagcctaaccgtcaaaactaaagcactcactattctcaaggtataataaagttaagagatattgccttcaattcaaactgtagcacaaggtttcctactactaataaaaataaaaactaactacacccggttcaaacaaaacccttgaaaaagaaccacgacccaaagaaaaatcaaggaggaattattacactatctaacaaaataaaatctttttatcttttcctttcgactttagtccctcaagaaacccgtcgaatgatattcatcgtcaggaaaagtcgcaaattttaaatttttatggttttgtttttcattttacttatctctaactactaaaacaacaaaaataaattactaacatatatagatacatataattttcccccaccccacactttacgttgtggcatgtacccatgacacacaattaagaagcgcaaggtaaaggaaacttccctgaatttttagtcgggtctgaatcgaagtcgagctccattccacgtgcctgaactagtgcacacatccacacagacaacttcttctcagccttcttgaggtataccccacagttatctttctcactcgatgtagtcttctcttttgaactcttaactttccactcaatacttgtagccggtttctcctttttcacccccgtctctacattcatctcgaacattacagtatcctcacccactctaagcatgagttttctatcatgtatatctaaaattgctctacccgttgctaagaatgatcttcctaaaatgagagggacctccttgttctcctccatatttaccactacaaagtctaccggaaacacgaacttatatacccgcactagaacatcttccactatcccctcggatattatagttgtttggtctggtaactgcaaagatattggtgcagaccttatctatctaagcttattctccagttttctgtaaatagacaaaggcattaaattaattgaggcaccagaatcacacaaagacttatcaaatttaatagagcctaaagagcaaggtatagtaaaattacctggatctccacatttttatgggagtgttttttgcaagattacattgcaatgctctgtgagcttgactactaatgtctcttcgattttccttttctttgtaaggatctccttcaagaattttgcataagctgacatttgggagagcacctctgtgaatggaaaatttacattatcctgtctcaacatatctaggaacctctcaaattgtttatctagattctctctataaagcttttggggaaaagttaaagcaggcatgtgcttgctctcttcattagattcctcccttctcgaagtttcctccttcttctttttctctactcccttcttacttttcttcttcttaccatcttcaattttcagctccttcccactttcttttacaagtatcacctctttttggattggagtgagatctttcaacacttgtccgcttctcaatgtcatagcatttatagtttcgttgggattcttttcagtatcagctggcaaagtagctgggattctctcagataatatagttgcaatttgtcccacttgtctctctaagttacgcaatcctgtaccatgttctttgatagacgcaccttgagcatctaacctctcatctgtcttgataataaatgacttcattagatcttctaacccatactgaattggctgttgaggctaaaactgcggtctcggctgattcccaaaactaggagctccttgaaatctggagttattttgatgtcatgcatttgatgtacccccaggtgaactccatgaaaaactggggtgcttctgacccattgcattgaagttattattacccacaacattaacttcctcagttaaggcttgacactcatgagtagggtgtcctcttccacatatatcacaccctgcatgaggctcattgcgtattgaggctaaggtcagcttccttatttctttggccatggcatcaatctgtacctacactgatgtgttggcatcaacttggtgaacaccagttgctcttcttctttcagcaatttcagagggccactgatttgtatcttcagataactcatctagaattgtgactatctactctggagtcttcttcatcaacggacctctagctgcattgttcaacgttctgtgtgaggtcggtgtcaatccatcccaaaagtcctggagttgcatctagagttcaattctactatgttcacactttcgcactatctccttgaacctctcccaaacttcaaacacagtttcattatcgttctgatagaaattatggatttctcttctaaacttgcctgttttagctgaggagaaatatttagcaagaaatgttctggtcatctcctcccatgttctaatcgatccatggggcaagcttcaaagccagtgctttgcatcatctttaagtgtgaaggggaatacccttaggtaaactacatcttgtgactcaccattgtattgaaaggggttcattaactcctcgaagtccatcagataattgttttgatcttcgttcatctttcctctgaagagacaattgttttaaagtatttggagaaacccttgcttcagctaaaaattattagctgcaactggaggtggtctcacacttgataagccttgattatataccggtctggcataatcacctaacggtctcccttggacgtgagctatgtttctgaactggtctacacccaagggctgattccgagccatttttcgatccctcttttcttcatatgaaatttgtgcatctctatgttttactccttcagcatcctttgcagctttctctctgagttgggctgcctctctcgctgccaaatcaacaatatcattatctccagccatatcttctttggttgaggattgcccaaccttttctattttttcggcgagatttctttccttcctcaactatcgcagttgtttctcgatttctgattcgtatggttgcaattctttccaagaaaatcgagtgatgcaccaatctaacctgtagcctgcgaacagtcaaagaacaccaaacataaaaagagaaaaataaaataaaaataaaaattcttgaattagtaatacaaactatttcaaacactattaattgtcaatcctcgacaacggcgccaaaatttgcctagcttaaaacacacactaaaatatgctcgctagtcgaatatagtataatataatatcatatccacagggattggagttaaacagtattatcgtagtttgtatctagattactatcgaagataatcaacattttagaattatgtgattaaaaattaaaattaactaagaatctaaagctaattgacaaatgaaaatcgaaacaaaagtaagtaaagaagatatcaatgggagaaaataggggttgattggataggtgcaagataaatgtctgggatttaactctagttaattcacttctaatgttcaagtgagtctctcgaattcactcaattattagttcaaacgtttagtagaaactcctctctcgattaagtctcaacctcacaatatgaaccaatttaagctcggtgaagatatgcaagaattcgtagtggattggtctttaggagaacctctctcgattatcctcctaactaggtttaatcaataattcaactagcctctttcgattactaagaagaattaatgaattcaaccaacaagataatgcaaagatatcacaagttatgcctctctcgattacatgaacatgtgaatatagatgcaacaattaaaacatccaaaatgattcaatgcataaaaactagagttaatatccataaacaaatatcaatacaccaaatccatcaatccctaaagagaactactccatagatatggagtaattcatcacaaatataaagaaaaacataaaacgatccaaactcttgtcttgagtgaggattgaatgatgaaatccttgtgctttcgcttctccacctcctctagcctccttaggtcttagatgtgtcaaaagtcccaaaaataacatttttacatgtatttatactaagtagggtcgggcccagatgaaaataccttttcctgcgcgaaataggataatactctgtaaaattgcacaggcgcgccgcatggggcgacgcgccagcggggcattgtgggaaacttcagagagtttctgacaggcaggaaattacacacgcgccgcggtgtatttctcagagtacggatttgcttgattttgacatccagacgtggtttcgacccccgaacgcgatcccggcttaatcccttgggcttttactcagacttcaaagctccaaatagctcaaattcattccataacatctacatagctcggaatcactcctacaaggcataaaatacacaattagtgcaaaacactagcgattaaagctcaaactcaattaaagtgcagtaaattagagtaataagcgactaaaacacgagattatagcctaccatcaacaccccacacttaaaccattgctcgtcctcgagcaatcaaactacactttatatagacacgaccttttttaaacaactctctaactcatcataccaagaatatttaaaatagactaagcacaatacgtaacatctagcctcaagatttgactcaaaagcaccacgcattatttataacccgctcacttactctaacacagaggtcaacgacattacctttccttcatgaatcaagtgccctcacaacaatagagagtagttccacacacaataaaattaagaacaattaggaactcaagatagaaagaattcactcactctcagaaacaacattcatatgccacaaaagatgaaccataggcttgcccgtagtgtactactcaactaatcgagctcattcagtcaaggatcaagtaggactttaattggttgtaatgtaggctgcgggacgggtaggatacatttagatataagagtgactacacctccctaagcactttaatacatacatttcattgttcaaaaccccacacttatgtcaaaccataactccaccttcacatcaatatacattaactcccaacttctttaagcacaattacatcaagatttaccactatcatggaatatttttcacaatcaaaactttttttttctttttcaattcaagtggctcttactttttcaatacagtgcacctttctccttatttcattagttccactcaaaagccaaaccaaccaccccacacttcaacttttacaaagttcataacaaatttaagtgctcacgagaggttaaaggttcaaatagatggtcaattcaaacaaatgggtaaggcttgtaatgtggttgccaaagaaacaagattacaggctcaaaggggttaactaagatacataacaattaggtgggtaaaagcatataactggctcaacaaagaaatgcctaaatcacttccaagactgaacaaactactatttcgctttgcaaacacacggggcaagttctagacatcaaatgcaatgcacagaatacacaaaacctcacacacacatggcataactcactcagattggactatcaagacactctagtcaaagcagttaagcaaagttaagatcatacaatttaaggtacttatgcaagagtcaaaaactgagcctaagcgtcacaactaaagcactcactattctcaaggcataataaagtcaagagatattgcttcaattcaaaacatagcacaaggtttcctactattctacaaaacaaaaactaactacacccggttcaaacaaaacccttggaaaagaaccgcggcacaaagaaaaaccaaggggaattattacactacctaacaaaaaaatctttttgtctttttctttcgactttaatccctcaagaaacccgtcgaatgatatccatcgtcgggaaaagtcaaaaattttaaatttttatggtttttctcatttttctatctctaactactaaaacaacaaaactaaattactaacacagatacatacaacatacaattttccccaccccacactttaagttgtggcatgttcctgaacaaagtgcacacatccatgcagacaacttcttctcagccttcttggggtacaccccacacttatcttttcactgcagccttctcttttgaactcttcactttccactcaacacttgcagctggcttctcctttttcacccccgtttctacattcatctcgaaagtcacagtctctcacccactctaagcatgagttttctatcatgtatatcaaattgctctacccgttgctaagaatggtcttcctaagattaggggatctccttgttctcctccatcttcaccactataaagtctacaggaaatacaaacttatctacccgaactaagacatcttccactatcccctcgggtattatagttgtttggtctgccagctgcaaagatattggtgcagaccttatctctccaatctcattctccagtttcctgtaaatagacaaaggcattaaattaattgaggcaccagaatcacataaagacttatcaaaattaagagtgcctaaagagcaaggtatagtaaaactccctggatctccacacttttgtgggagtttgttttgcaagattgcactgcaatgctctgtgagcttgactactgatgtctcttctatctttctcttctttgtcaggatttccttcaagaacttggcataagctggcatttggagagcacttctgtgaatggcaaatttacattaacttgtttcagcatatccagaaatctctcaaattgcttgtccagcttctctctataaagcttttggggaaaaggtaaagcaggcatatgcttgctcttcagattcatcccttcttgaattctcttccttcttctttttctcagttcccttcttgcctttcttcttcttatcaacttcatttttcagctgctccccactttctttttcaggtaccacctctttttggataggggtgggctctttcactacttgtccacttctcagagttacaacatttaccgtctccttggggtttctttcagtatcagctggcaaagtacctgggatcctttcagacaatatggtggcaatttgtcccacttgtttctccaagtttcgcaccctgtgccaagttctttgatagctgcaccatgagcatctaacctctcatctgtcttgacaataaaggacttcatcagatcttctagcccaggctgattggattgttgaggttgaaactgctgcctttgctgattttggaagcctggagctccttgtccctggaatctggagttgttttgttgccatgcatttgcagtacccccaggtgaactccatgaaaaaaccggggtgcttctgacccattgcattgaagttataattcccacaacatttacttcctcagttgaggcctgacactcatgagtagggtgtcctcttccacatatatcacaagctgtgtgattctcactttgtattgaagctaaggtcagcttccttatctctttcgccatggcatcaagttgtacctgcacagatgtgttagcatcaacctggtgaacaccattcgcccttcttctttcagcactttcagagggccactgatttgcatcttcagacaattcatcgagaatagtgactatctcctctggtgtctttttcatcaaagggcctccagctgcattactcaatgttctacgtgaggccggtgtcaaaccatcccaaaaatcctggagttgcatccagagttcaattccgctatgttgacactttcgaactaattccttaaacctctcccacgcttcaaacacagtttcagtctttctggcagaagttatggatttctcttctaaacttgcccgtcttagctgaggagaaatatttatcaagaaattttctggtcatctcctcccatgttctaattgatccctggggcaagcttcgaagccactgctttgcatcatctttgagtgtgaaggggaatgcccttaagtaaactgcatcttgtgacacaccattgtattgaaaggtgttcataatctcctcgaagtccattagatgtgtatttggatcttcgtttcttccctctgaagacacaacaattttgaagagtttggagcaacccttgcttcaattcaaaattgttcgctgcaactggaggtggtctaacacttgataagccttggttgtagaccggtctagcataatcaccaagtggtctcccagccgggagctatatttcctggtctgcacccaagggtgattctgagcaattctccgagccctctcctcttcatagacaagttgtgcatttcgaagagctgcttcctcagcatctcgtgcagctttttctctttgttgggctgcctctcttgcagccaaatcaacattatcatcatctccagccataatttctttggttgaggattgcccaaccttctctatattctcggggagatttctttccttcctcaactgtcgcagttgtttctcgatttctggttcgtatggtagcacttccttcccagaagatcgagtcatgcaccaatctaacctgtagcctgcgcacagtcaaagaacaccaaacgtaaaaagggaaaaataaaataaaatgaattagcaactatttaaaatgatgctcgctagtcgaatatagtataatataatatcgtatccacagggattggagttaaacagtattttcgtagtttgtagctagattgctatccaagatgatcaacaattgagaattatgtgattaaaactaaaattaactaagaatctaaagctaattgactaatgacaatcgaacaaaagtaagcaaggaagatatcaatgggagaaaataggggttgattggataggtgcaagataaatgtctgggatttaactctagttaattcacttctaatgttcaagtgagtcgctcgaattcactcaataattagttcaaatgtttagtagaaactcctctctcgattaagtctcaacctcacaatgtgaaccaatttaagctcggtgaagaaatgcaagagttcgtagtggattggtctttaggattactagcctcctccgattactaagaagaattaatgaattcaaccaacaagataatgcaaacatatcacaagtatgcctttctcgattacatgaacatttgaatatagatgaaacaactaaaacacccaaaacgattcaatacataaaaaaaactagatttaatatccacaaacaactatcaatacactaaattcatcaatccctaaagaagaactactccatagatatggagtaattcatcacaaatataaagataaacataaaacgatccaaactcttgtcttgagtgaggattgaattatgaatccctttgtgcgttttcttttccacctcctccttagcttccttaggtctaagatatgtcaaaagtcccaaaaataatatttttccatgtatttatactaagtagggtcgggcccgaacgaaaacaccttttcctatgcaaatttggaaaatactctgtaaaaaatgcataggcgcaccgcatgtggcgacgcgccaggcggggcggttgtggggaaatccaaagagctgatttttcctctttgcaggaattttgcactagcgctatgaggcccgcagggcggtagtgcaattttctaagactgaatttgttatctcattgtttttatgttcatgcttggattttgacccccaaacgcgatcctggcttaatcccttggacttttactcagatttcaaagctccaaatcactcgaattagctccatagcattcacatagctcggaatcctcttacaaggcactaaatacacaattaatgcgaaacacaagcgattaaaactcaatctcaattaaagtacaataaattagagtgtaataagagagtaaaacacaggattataactgtaatgacccggtcggtcatttcgagagttataaccctgttttccccattcctacttctgtttgtgtcattcagctatattatgttatatcgggttaattggttcgagtccggaaggaactcggggtgaaatgagacacttagtctcataattgaaattttaagttagaaaaatggaccggatatggacctatatgtaaatgacctcagatttgtattttgatgattccaatagctccgtatggtgattttgggcttaggagcgtgtccggaatagttttttggaagcccaatttggcttgaaatgccgaaagttttattttgagaagtttgaccggggggttgactttttgatatcggagtcggtatccgattctgaaaattggaatacctatgtcatgtcatttatgacttgtgtgcaaaatttgaggtcaatcggaagtgatttgataggttccggagttgtttgtagaaattagaaattttaaagttcattaggcttgaattggggtttaattcatggttttagcgttgtttgaggtgatttgaggattcaactaagttcgtatgatgttttaggaattgttggtgtatttggttgaggtcacgagggcctcaggtgagtttcagatggttaacagatcaaaaattgaactagaataactgctgcaatttccttctgttggaaattgcttctacccagcgatcgatcctagaatcgaggggcatgatcgaagatacgatcgagcccagaatcgaggggcacgatcgagcccagaatcgaggggcacgatcgaagatatgatcaggcccagggtcgagggtcacggtcgaaggccaagatcgaaggcatgatcgaaggcatgatcgaaggcctaggaccgagaatcaggattgaaggccctggatcgaggcccaggatcgagggccaagatcgaggacctctatcgaagaccgaggatgtctgggcagaactataaaatcagggacttcgtctcattcgccatttttgaaaaattggagcttggggagagccggtttttggtatattttcaaggaaaaacttgaggtaagtcccttgttatcatttatactccataatattgaattatcatcgaataatccgagtagattacattattttgaggtgtaaatcggatattggaacatagaaatttggaaatacgatttatacatttgagggtcgagttgaggttggattttggtaaaattggtatgggtagactcgtgattgaaagggctttcagattttatagcttttgtcgggttccgagatgtgggccccacaggcgattttgagccaatttcgggttttggtctaattttgaagcttttcttgtggaatgcaatccattagcgtatattgatggtattatactgatttttaatagatttggagcatttggaggccgaatccagaggcaagagcattgcgaggtagagatttgaccggtttgaggtaagtaacgattgtaaatcnnnnnnnnnnnnnnnnnnnnnnnnnnnnnnnnnnnnnnnnnnnnnnnnnnnnnnnnnnnnnnnnnnnnnnnnnnnnnnnnnnnnnnnnnnnnnnnnnnnnnnnnnnnnnnnnnnnnnnnnnnnnnnnnnnnnnnnnnnnnnnnnnnnnnnnnnnnnnnnnnnnnnnnnnnnnnnnnnnnnnnnnnnnnnnnnnnnnnnnnnnnnnnnnnnnnnnnnnnnnnnnnnnnnnnnnnnnnnnnnnnnnnnnnnnnnnnnnnnnnnnnnnnnnnnnnnnnnnnnnnnnnnnnnnnnnnnnnnnnnnnnnnnnnnnnnnnnnnnnnnnnnnnnnnnnnnnnnnnnnnnnnnnnnnnnnnnnnnnnnnnnnnnnnnnnnnnnnnnnnnnnnnnnnnnnnnnnnnnnnnnnnnnnnnnnnnnnnnnnnnnnnnnnnnnnnnnnnnnnnnnnnnnnnnnnnnnnnnnnnnnnnnnnnnnnnnnnnnnnnnnnnnnnnnnnnnnnnnnnnnnnnnnnnnnnnnnnnnnnnnnnnnnnnnnnnnnnnnnnnnnnnnnnnnnnnnnnnnnnnnnnnnnnnnnnnnnnnnnnnnnnnnnnnnnnnnnnnnnnnnnnnnnnnnnnnnnnnnnnnnnnnnnnnnnnnnnnnnnnnnnnnnnnnnnnnnnnnnnnnnnnnnnnngttgaaaccatttgatactcatatgttttagaaagaattcctgtaaattgggctgaataccatgtttgggcctagcgccaatgttgcttggacccttatgggttgtttcttaccatcctctcattgttttcgattgaaaattctatgctcagtcgtgtttatgcttgtttaccacataactcagttttatgactctattttatgcatataaatgttttgggccgaatgccctgttttactgaaatgcccgagtggcttgaaatatttatgactgagtgaggccgagggcctgattggtgaggatgagtatggatcggggctgcccgcctgcagcatacttgtgactgagtgaggccgagggcctgatttgtgaggatgagtatggatcggggctgcccgccagcagcatactttattattatcgcacgtgagttgtccgtgcagattatagcgcttgggatgaaggattccctccggagtctgtacacaccccagtgagcgcaggtacctactgagtgcgagtgccaagtgccgagtgcagagtgattgtgaggtatgcccgagtggcaagagtgatggtgaggtatgcccgagcggcaagagtgattgtgaggtatgcccgagtggcaagagtgattgtgaggtatgcccgaggggctgtttatgatttcatcatttttactcacatttgctgaacctttgtttgaaaaactgttggaaaaatatctttaaatgagttttactagaatcgggtttaaacgagacggtttgattcaaacactgatttttaagcatgttgtactttactgagatttcatgatatgaacgttatatgctttattgctcgtcactactgctnnnnnnnnnnnnnnnnnnnnnnnnnnnnnnnnnnnnnnnnnnnnnnnnnnnnnnnnnnnnnnnnnnnnnnnnnnnnnnnnnnnnnnnnnnnnnnnnnnnnnnnnnnnnnnnnnnnnnnnnnnnnnnnnnnnnnnnnnnnnnnnnnnnnnnnnnnnnnnnnnnnnnnnnnnnnnnnnnnnnnnnnnnnnnnnnnnnnnnnnnnnnnnnnnnnnnnnnnnnnnnnnnnnnnnnnnnnnnnnnnnnnnnnnnnnnnnnnnnnnnnnnnnnnnnnnnnnnnnnnnnnnnnnnnnnnnnnnnnnnnnnnnnnnnnnnnnnnnnnnnnnnnnnnnnnnnnnnnnnnnnnnnnnnnnnnnnnnnnnnnnnnnnnnnnnnnnnnnnnnnnnnnnnnnnnnnnnnnnnnnnnnnnnnnnnnnnnnnnnnnnnnnnnnnnnnnnnnnnnnnnnnnnnnnnnnnnnnnnnnnnnnnnnnnnnnnnnnnnnnnnnnnnnnnnnnnnnnnnnnnnnnnnnnnnnnnnnnnnnnnnnnnnnnnnnnnnnnnnnnnnnnnnnnnnnnnnnnnnnnnnnnnnnnnnnnnnnnnnnnnnnnnnnnnnnnnnnnnnnnnnnnnnnnnnnnnnnnnnnnnnnnnnnnnnnnnnnnnnnnnnnnnnnnnnnnnnnnnnnnnnnnnnnnnnnnnnnnnnnnnnnnnnnnnnnnnnnnnnnnnnnnnnnnnnnnnnnnnnnnnnnnnnnnnnnnnnnnnnnnnnnnnnnnnnnnnnnnnnnnnnnnnnnnnnnnnnnnnnnnnnnnnnnnnnnnnnnnnnnnnnnnnnnnnnnnnnnnnnnnnnnnnnnnnnnnnnnnnnnnnnnnnnnnnnnnnnnnnnnnnnnnnnnnnnnnnnnnnnnnnnnnnnnnnnnnnnnnnnnnnnnnnnnnnnnnnnnnnnnnnnnnnnnnnnnnnnnnnnnnnnnnnnnnnnnnnnnnnnnnnnnnnnnnnnnnnnnnnnnnnnnnnnnnnnnnnnnnnnnnnnnnnnnnnnnnnnnnnnnnnnnnagtagcggttattgagtgttctggttgcaggtttttttttctcggagacagtaaggtagttgttggcgatcgcagcccctgctcttctccctcttatctccctctagttatatttagctattttccaggctaagttagcctcgatattgttatacagattatagtagatgctcatgactagtgacaccccgatgtcgggcttttcttttccgcaaattctattttttcttgatttgaactcttttaaatggaggttttattttaattaaccttgaaattatctttgaaatgaaatatcagtttgttttggaaatgagtcggcctgcctagttccacgataggcgccatcacgacatggttagttttgggtcgtgacaataacctaccatcagtcaccttctgatattttcttgcactgttgattccactttagaacagttgtatttagaaattttatagtaaactctatagagcttgtgactagcactaccggttttgggattgtagggaatttctatttcagattattctagataaattgtttcgttattaccatttaaactgaactattaaaaaatgactaaaattattctaaagttggcttgcctagcaagttaaatgttaggcgtcatcacggtcgcgaaggtgggaatttcgggtcgtcacaagttagtatcagagctctaggttcatgggtgctacaagtcataagcaggtttagtagagtcttgaggatcggtacagtgacgtttgtacttatcttcgagaggctacagaaactaataggaaattccacttcttttattcattgtcatgcgatatttattcagcttgaggcacatatcttatattcatacacatccactcatgtatgacattgcgcactcgataacagttgtgcgctggcggttcgtgatgtcgctgatagactacaagggagccagggatgctcgaacatcgtctcaacgtgtggccgtgactgaagatgtagatgtattgaaggatcactcattgatttacgtgggggtgcaatggattcttgcatctggttgatgagtacgagctgtgaaggttagtattgtggatcaaggacgttgtgtcctttggcttcatgccaagtgggggagtccgctatagatgaacatattgcggggtcatgtgttatattagttctggcctgagatgtgcatatttggtactaaaaggttccccaaattttgcacatgtttaaggcctgagattttgatggtgataatgttgggacttgcagtatgactgcgtccttaataatcctatttcagtatcaaaggagttagagaaacaacttcaaatttatagaaggtctattcaacgtggacgtttggttgcggcagtatggggtgcttcagaggaagtacggtggttgatgagctgatgggctatgtggtttgtgccaagatttgtctgtacggagctttacttttgggatcgtcatgtacaaataggggggagtattaccccaaggaagaaacgaggaatatgtgaaaaaatgggtcagctcggtggtgctgggttagaatagcaaaggaagaaattggcctttggagagataattctccaccggtgtttgtggcaagtctatgaagagggtagaccatccaatgcaacaccacctacttgggctcatttttcagagatgattttgagggagtttgttccctagactctacggaatgcatggcgcatagagtttgaagaactgcgtcaggacaccatgacggtgtcagaatatgccatcaggttcaaagagttagcctatcatactcttactttggttcctatagccagagagcgagtccacagattcattaaaggactcagttatgatcttagattctgtatgactccagggctacaagctgatacttcatttcagcaagtggtggaaattgccaagatgttacaacgtgtttgaggtgaggaaaaggatactagggagaccaagaggtctcgaggttctggagaattcagtggatgctactgtcacggcccaatttcataataggtcatgatggtgcctaacaccgctgctaggcaagccaacagtgaactagtcatgtgatttcctctttttaacaaaattcttttccaattaatgaaactttccttaatttaaaaagaatttgaggaataccagatctaaaataaataacacgaaagcaactgtgtgcattcataatcatagaataaaaccaaatctgcaagtctactagtttgtgtgccaagacctagtgtcacaagtgtatgagcacctggtgtcacaagtctactagtctattgtccgaagtgaaatagacagaaaaatacaatcaaaagaaagactccggctgctgcagaacaggctcagaaggcatctcaccgtgaagcctcgaagtggtaatcaagtgcgcgcaccggactgatattcagatgcacccgcctcaaatcctgcacatttaagtgcagaagtgtagcgtgggtacataaacaacgtgtacccagtaagtatccagtctaacctcgaagaaatagtgacgaggggtcgactttgacacttactatgggctaacaataatatgtcaaaattttaattaagcatggattacacgaagaatactgaaaacccaataataggaaacactaaataatcctttcaccaatattaagtcccaaatttactattttttccattatttaacaatttatatctcaagccaaagaagcaatatcaattataattggttccaaagatttatcatgtgcaaattatgccgaggtcgtacaactcgatccaacataaaatttaaattgtgcactgccgagggtcgaacggcacgaaccatggatgcatctatctgctaccgaggcattcggcccgctccacaaatagaaaatattttaaggaaaagacaaattctcaataacagtcaagtgttccattcacaacttcaagtaagtgaaatttaattcttttatcaggtttcaaaagacttaagcaattaagttaacaagtagggtacaaacattgtaagtatagcatgatatgggtcctagactacccggacaatagcataattggtagctacgtacggactctcgtcacctcgtgcgtacgtagcccccacaaatagaagcacatttttaattcaattcacctatggggttaattccctcttacaaggttagaaaagagacttaccttgtctcaagcctactttcgatccaagatttgtgctcaaacccttaatttggtgccaaaatgtctcaaaactagttgaatgttatataaaatagtcaatataggctcaaaagttcatattctaactattaaagcgattacccaaccccaattgatgcattcccaaaattcacccccgggcccacgtgcccggattccggaaagtttccaagcaaattcttacccataacctcatgaactcaaatatatgatttttactaaattccataacaaattccgtggttaaatcttatttttgttaaaaacctagattatcacctaaacccttgattttcactaatttacatgttataatatacaaacaaactatgtattaaactcacattgcgtgaaaattacttacctcaaagtgctaggtgaaatcccctctctaagagctccaagaatcgcccaacattgaaagcaaatgagccaaaatagcctaagtgtcgtttttaaaagatgattctgcccagagatccttatacgcgattgcggccaagctctcgcgatcgcgatggctaaactgaagagcccaggaaaaggctctacgcgaatgcgagaggacccatgggaacgtgatgcactgggctgcatactattcacgaatgcgaggtcaaacacgcaaacgcgtaaggaaactgggttgcccaggcctaggcttctacgcgaacgcggcctgctcaatgcgaacgcgaaggccaaagggcccaggccttcgcgaacgcgtccctgcgtatacgaacgcgaagggaaaaaacctccagtccccaaatccttcaccgcgaacgcgagggtctgtccgcattcgtgaagaaggaaaccagaacagaaaatctggtgttttcaacttaactccgggcggtccaaaacacacccgagcccctcgggactccgtccaactacaccaacaagtctataaacataacatggacttgctcgaactctcgaaactcgtaaaacaataacaaaaccaagaatcaaatcccaaaattgaataaaaatatgaactccaagtttccaaattgctccgaacgcgctgaatcatacttagactactcggaatgataccaaattttgcgtgcaagttttaaatcaccatgcggtactattcccagtctcggaatcccatttggaccttgatatcatgaaaacatactccaaaccaaatttaaagaactttaaaaccttcaaagtataaactttcactattaagcgccgaaacgctcccaggtcatccaaaacccgatctgaacatacgcccaagtccgaaatcatcatacgaacctattggaaccgtcaaatctcgattctgaggtcgtttactcaaaacgttagccaaagtcaaacttagcctttttatccaacttaaggaatcaagtgttccgatttcaacccgaactcttccaaataccgaactaaccattcccgcaagtcataaaatagtaaaagcatgtacgagaagccttatttaggggaacggggttcttgaaagcaaaacgactgatcgggtcattacatcctccacctcttaaaaaaacattcgtcctcaaacgggttcagaatcatacttggagtgctaaataaatatggatatctactctgcatgtcttcctcggactcccaagtcgcttcccggactagttggcccctccactggacctttaccgcagaaatcttcttggacctcaaatggaaaacctgcctatccacaatggcaactggctcctcctcataacccaggctctcatctaactgaatcgtgatgaagtataacacatgtgacaagtcggcatgatacctccggagcatagacacatggaaaatcgaatgaacccccgatagactgggaggtaaagcaagctcataagaaacctccccaagtcgtcttaacacctcaaatggacctataaaccttgggctcaacttgcccttcttctcgaatctcacaatccccttcctcggcaagaccttccaaagaaccttctcgcccatcataaatgataaatcacgcgccttctgatccgcgtaactcttctatctggactgtgctgtgcgaagtcgctcctgaatcaactttaccttttccaaggagtccttcaccaaatcagtaccatataacttagcctcaccgggctcaaaccacccgatgggagaacgacatcgccgaccatataaatcctcaaatggagccatnnnnnnnnnnnnnnnnnnnnnnnnnnnnnnnnnnnnnnnnnnnnnnnnnnnnnnnnnnnnnnnnnnnnnnnnnnnnnnnnnnnnnnnnnnnnnnnnnnnnnnnnnnnnnnnnnnnnnnnnnnnnnnnnnnnnnnnnnnnnnnnnnnnnnnnnnnnnnnnnnnnnnnnnnnnnnnnnnnnnnnnnnnnnnnnnnnnnnnnnnnnnnnnnnnnnnnnnnnnnnnnnnnnnnnnnnnnnnnnnnnnnnnnnnnnnnnnnnnnnnnnnnnnnnnnnnnnnnnnnnnnnnnnnnnnnnnnnnnnnnnnnnnnnnnnnnnnnnnnnnnnnnnnnnnnnnnnnnnnnnnnnnnnnnnnnnnnnnnnnnnnnnnnnnnnnnnnnnnnnnnnnnnnnnnnnnnnnnnnnnnnnnnnnnnnnnnnnnnnnnnnnnnnnnnnnnnnnnnnnnnnnnnnnnnnnnnnnnnnnnnnnnnnnnnnnnnnnnnnnnnnnnnnnnnnnnnnnnnnnnnnnnnnnnnnnnnnnnnnnnnnnnnnnnnnnnnnnnnnnnnnnnnnnnnnnnnnnnnnnnnnnnnnnnnnnnnnnnnnnnnnnnnnnnnnnnnnnnnnnnnnnnnnnnnnnnnnnnnnnnnnnnnnnnnnnnnnnnnnnnnnnnnnnnnnnnnnnnnnnnnnnnnnnnnnnnnnnnnnnnnnnnnnnnnnnnnnnnnnnnnnnnnnnnnnnnnnnnnnnnnnnnnnnnnnnnnnnnnnnnnnnnnnnnnnnnnnnnnnnnnnnnnnnnnnnnnnnnnnnnnnnnnnnnnnnnnnnnnnnnnnnnnnnnnnnnnnnnnnnnnnnnnnnnnnnnnnnnnnnnnnnnnnnnnnnnnnnnnnnnnnnnnnnnnnnnnnnnnnnnnnnnnnnnnnnnnnnnnnnnnnnnnnnnnnnnnnnnnnnnnnnnnnnnnnnnnnnnnnnnnnnnnnnnnnnnnnnnnnnnnnnnnnnnnnnnnnnnnnnnnnnnnnnnnnnnnnnnnnnnnnnnnnnnnnnnnnnnnnnnnnnnnnnnnnnnnnnnnnnnnnnnnnnnnnnnnnnnnnnnnnnnnnnnnnnnnnnnnnnnnnnnnnnnnnnnnnnnnnnnnnnnnnnnnnnnnnnnnnnnnnnnnnnnnnnnnnnnnnnnnnnnnnnnnnnnnnnnnnnnnnnnnnnnnnnnnnnnnnnnnnnnnnnnnnnnnnnnnnnnnnnnnnnnnnnnnnnnnnnnnnnnnnnnnnnnnnnnnnnnnnnnnnnnnnnnnnnnnnnnnnnnnnnnnnnnnnnnnnnnnnnnnctcgatgttggactgataactgttgttgtaagcaaactcggccaaaggcaagaaccgatcccattgtcacccaaagtcaatcacacatggccttagcatatcctccaagatctgaattgtccgctccgactgtccgtcggtctgtggatgaaatgttatgatgaactctgcacgggtccccgattcactctgtactactctccagaaatgtgaagtgaattgagggcctctatcttataagatggaaattggcacaccgtgcaaccgaactatctcctgaatataaatctgggccagcctctctgaagtatacgtagtcacaaccggaatgaagtgtgtcgacttagccattctatcaacaatgtcccaaactgcattgaacttccgcaaggtccgcggtaacccaactacgaaatccatagtaatgcgctcccacttccactcagttatagtcatctgctggagtaggccacctggcctctggtgctcatatttaacatgctggcaatttaggcacctagctacatactcaactatgtctttcttcatctgccgccaccaataatgctacctcaggtcgcgatacatcttcgtagcacctgagtgaatagaatatcgagaactgtgtgcctcctctaaaatcctctcccgcaagccatcgacattaggaacacatagacgaccctggagtcacagaacaccatcctcgccgatagtaacctctttggtgccaccctgtagtaccatctctctgaggaccaacaaatgcggatcatcaagctgtcgagctttgatctgctccaatagtgaagactgggcaatgatgcatgcaagagctcggttgggctctaaaatatccaacctcacaaatctgctagccaaggactgaatgtccaaagctattggccactccaatgctgaaatgaaggccaagctacccatactctctgcctttctgctcaaggcacccgcgactacattcgccttgcccggatgataaagaatggtgatatcataatccttaagtaactcaagccatctgcgctgcctcaaattgagatccctttgcttgaacaaattctgcaagttgtgatgatcagtgtaaacctcacaggataccccataaagataatgcctccaaatcttaagagcgtgaacaatcgcggccaactccaaatcgtgcacaggataattcttctcatcgggcttcagctgacgtgaagcatatgcaataactcacccctcctgcattcatacacaacccaaacgaatgcgtgaagcattgcaatacatagtatacatccccgagccagaaggtaacactagaactggtgttgtagttaaagctgtcttgaacttctgcaagctcgcctcacaaccatcggactaacgaaacggagcacccttctgggtcaatctagtcaaaggtgttgcaacagatgagaatccctccacaaatcggcaataataacctgctaaccccaagaagatcccgatctcagtcgccgtagtaggacgagaccaactgtgaactacctcaatcttcttgggatccaccttaataccctcgcctgttacaacatgccctaagaatgctacagaatctagccaaaactcatacttggagaacttagcatatagcttctgttcccgcaaggtctgaagcaccactctcaaatgctgctcgttctcctccatactatgtgaatagattaaaatgtcatcaatgaagacaatgacaaataaatcaatatatggcccgaacaccctattcatcaaatccataaacaccgctggggcattagtcaagttgaaggacatcactagaaactcataatggccatgtctagtacggaaagcagtcttcggaaaaactaagtcccgaatattcaactgatggtgctccgatctcaagtcgatcttatagaacaccctagcaccctgtaactggtcaaataaatcatcaatacgcggcaacgggtaattgttcttgatggtgaccttgttcaactggcagtaatcaatgcacatccacatagtcccatctttcttcttcacaaataagactggtgcaccccaaggagatacacttggtctgacgaacccttttgctagcaactcctcaagttgttcctttaactccttcaactctttcagatccatgtggtacggtaggatagatataggctgggtacctggagccaagtcaatatagaaattgttatgatggtctggtggcatgcttggaagtttagaaggaaacacatcggagaactcccagactattggcaccgaatcaattgtcggggtctcttcggtagtatccccaacataagctagataagccaaacaatctttctcgaccatatgtcaggccttcagaaaagagataacccaactagatgcacttacagacgaaccctttcactctaatctaggaaactctggcatcgccaaggtaacagtctttgcatggcaatcaaggatggcgtgatatggggatagacagtccatgccgatgatgacctcaaagtcggtcatataaagcaacagaagatccgttctagtctcatatccatagaatatgaccacacaggaccgataaatccaatccataatgacagaatcgcccacaggagtggacacataaacaggagtgcccaaggactcacgaggaatatccaggaaatgagcaaacagagatgaaacatatatataggtagaccctggatcaaataataccgaagcatccctactgtagataaaaataatacctgtgatcacggcatctgaggccactatatctggtctggccgaaaaggcatagaaccttgccggggtaccgactggtcgacctccacctgtctaggctgcagctggctgtcctccacctgcctggcctccacctctaggtcggatagctggtgttgtaatcatgggatgttggccctgctacactgccttgccctaaagcttggggcagaatctccacacatgactgaaatccccacacttgaagcaacctcctggtacagtgatctgcggccctgaagtctgaccttgatggcctaaatacccactggaagaaccctgaatggccagtgggcgatatgaactctctggcatggggctaaagtaggcgctggaagaaccttgatggactgagtacccactggaagaatcctgaatagctagtgggtggtatgaactctccggcatggcactgaaatagggtctcgccggagcaccccgaggaggtggtgatgctagatatgtgggcctactgggatgacccctcccaaactcgcctcgtcccctgttggggcacctctaaactccccaaaataacagaccctcttgtccctttgcatctgctctctacctctctgatggtaaccctcaatcctttgagttatatccactactagctggtaagaagtccccatctcaacctcccgggccatagtagcctgaatacctgagtgcaaccccgcaacaaacctctacactcgctccacctcagtaggaagtatcataagtgcatggcgagacaactcagagaatctcgcttcataatcggtcactgacatctgaccatgttggagctgctcaaactgaaaccgcaactcttccctctgagagggtggaatatacttgtccaagaataggcatgtaaactggtcccaagtcataggaggagaacctgccgtcctcccaagaaggtaagactgccaccacctacgggccctgccctccagttggaaagtagtgaaatccacctcgtgggactcaaatatcctcatgttgtgcagtctgcccctacaatgatcaatgatgtcctgggatcctcatgtcgctcacctccgaagatggtagggtgtagtctagtccatctattcaatagcttctgtggctcgccggccacagctggtctaggcttaggtgccgctactgcaactggctgggcaccgcccacaggtagtgcacccagggtctgatatacggcagccgcatgtcatagagcctgagcagtatgggtcgtgctccccctcccgcctgagatatggttgggtctgctgaaaataaaccagcctgggtcatagaatccatgaaccgtagcaaacggcccatggcctcctgaaatcccagtgctgacatgaaatcgaccaaggctggctttgctgcgagaacctcgccctgctcttcaataatggggtcctccactggatctactggtggtgcaactggggcaactctcggatgtcgtcgtcccttacctcgggtagatgccctcccccgacctctacatcggcctctagcagtagggggagcagcccctcccgggtttggaaccatcgtgcgcgttctcaccatctgtgagagaataagagaagaaactcagtacaccattaattgcacgataggagatgaatgaagagtagtttcctaacaccctatagcctcttgaagataagtacggacgtctccacaccgatctgcaagactctattaggcttgcccataacctgtgagacctacgtgaacctagtgctctaatactatgttgtcatgacccaatttcataataggccgtgatggcgtctaacgccgccgctaggcaagccaactgtgaacttgtcacgtgatttcctttttttaacaaaattcttttccaagtaattaaactttccttaatttaaaaagaatttgaggaataacagatctaaaataaataaaacaaaagcaactgtgtacaatcataatcatagaataaaaccaaaaccacaagtctagtagtttgtgtgccaagatctggtgtcacaagtgtatgagcatctagtagaatatataaaagaaatctagtctactgtctcaagtgaaatagacagaaaaatacaatcaaaagcaagactccggctgctgtagaacgggctcagaaggcagctcaccatgaagcctcgaggtggcaatcaagtgcgcgtgttggactgatatccagatgcacctgcctcagatcctgcacatttaagtacagaagtgtagcgtgagtacataaacaacgtgtacccagtaagtatccattctagccttgaagaagtagtgatgaggggtcgactttgacacatactatgagctaacaataatatgttaaaagtttaattaagcatggattgcaagaagaattctgaaaacccaataacaggaaacaataaataatcctttcaccaatataaatcccaactttacatttttttccatcatttaacaatttatatctcaagccaaagaagcaatatcaattataattggttccaaagatttatcatgcgcaaattatactgaggtcgtacggcccgatccaacataatatttaaactctgcactgccgagggtcgaacggcatgaaccatggatgcatctatctgctactgaggcgttcggcccactccacaaatagaaaatattttaaggaaaacacaaattctcaataacagtcaatagttccattcacaacttcaggtaagtgaaatttaattcttttatcaggtttcaaatgaattaagctattaagttaacaagtaggatacacacattgtaagtacaacatgatatgggtcctatactacccagacaatagcataattggtagctacgtacggactctcgtcgcctcgtgcgtacgtagccccacaaataaaagcacatttttaattcaactcacctatggggttaattccctcttacaaggttcgaaaagagacttaccttgtctcatgcccactttcgattcaagatttgtcctcaaactctcaattaggttccaaaatggctcgaaactagtcgaatgttatataaaagaatcaatataggctcaaaagttcatattctaactattaaagagattacccaaccccaattgatgaattcccaaaattcactcccgggaccacgtgcctggatttcgaaaatatttgaagcaaattgttacccataacctcatgaactcaaatatattatttttactaaattccataacaaattctgtggttaaatctcatttttgtcaaaaatctaggttttcacctaaacccataattttcactaatttacatgttattatctacccatgaactatgtattaaactcacattgagtggaaattacttacatcaaagtactaggtgaaatcccctctttaagagctccaaatatcgcccaacaatgaaagaaaatgagccaaaatagccttactcccgtttttaaaagttgattcttctaaggggtccttacacgcgaccgcggccaagctctcgcgatcgtgatggctaaactgaagagcccaggaaaaggctctatacgaacgcgagaggacccatgcgaatgcgatgcactgggccgcatactcctcgcgaacgcggggcaagcacgcgaatgcgtaagacaactgggttgccctagtccaggcccaggcttctacgcgaacgcggcctgctcaatgcgaatacgaaggccaaagggcccaggactccacgaacatgtccctgcatatgggaacacgaagggaaaaaagcaccagtccccaaatccttcaccgcgaacacgagggtctatccgcgttcgcgaagaaagaaaccagaacagaaaatctggtgttttcaacttaactccgggcagtccgaaacacacccgggcccctcgggaccccgtccatctataccagcaagtctataaacataatatggacttgcttgaactcctgaaatgcgtaaaatatcaacaaaacaaagaatcacaccccaaaaccaaattaaatcaaaatatgaactccaagtttccaaattactccgaacgcgctgaatcatacttaggctactcggaatgacaccaaattttgcgtgcaagttttaaatcacaacacggaactattctcggtctcagaatcccatttggatctcgatatcataaaaacctactccaaaccaaatttaatgaacttcaaaaccttcaaagaacaaactttcactagtaagcgccgaaactctcatgggtcatccaaaacctgatccaaacatacgcccaagtctaaaatcatcatatgaacctattagaaccgtcaaatcttgattctgaggtcgttaactcaaaacattgagcgaagtcaaacttagactttttagccaaccttaaggaaccaagtgttccgatttcaacccgaactcttccatatcccgaactaaccatccacgcaagtcataaaatagtaaaatcatgtatgagaagtcttatttagtagaatggggttgtagaaagtaaaacaatcgattaggtcattatatttctgcagctataacttattatggcggagactcgagcagtcggtcagctcagtccgcgcattagattatacggggtgcaccagtaagttcttttactgcaccatcagcacgagatttatataatggttattccaattacccggcaaagacttagtatgagcagccgaacctagagaggggttgttatgagtgtgatgatactaggcacatcatgagagattgtccgagacttgggagagacatattacattagaacactcaagccacatgctccatttcagttgctactctacctacatattcagttaggggtgttggacaggcgggtagagggcgtcctagaggtggaggaccggcccgttggtataattgctatgaattggttgaggccgttacaccaaatggtgttgttacaggtatgatttaattcataatagaggagcactattcttattttgattctattcctattatcaaggtgagatctcctttcatgctccttatatggtgagtttgtgaatttgtactctactcccgtgtttatccctattgggagattcgatggtgttagcccgtgtctattatttttgttttgtacattattgagggctctgagtccaaaagtgactttctgttactcactaccataggttttgatgtaatttcaggataatttgttacaattttatgaattatattccctaccaatatgggggttcattatgtgttgtgaatttgtttaacgaaaattatttttaaagaagaaaatggaaagattttgattggaacaatgttcatattacttgtgattcagagctgaggatagaaattctcgcattttaatatgatttgatatgtttaaaccgtgctacacgccacagtagaagttacatcaggataagatctttttgatggaaatttatgtgtttaaattctcccttgtgaaattaaatttgtactatagtattgaaagggagtcatgcctgttaggcttatttgataattcttatatgtgcttctccgtgcataattttccatattcgtgttgtaattattgagttttagcatacgaggtgggtgccttggtgacgttaaatgtgattcattaattcgggtaaataattatgaagccttcatgccttgtgtctcgttgtcagtattgtgaaggtttgaaatgagattttgttaacgtgaagttaattgacgatgctgtaattggttatgaacaactattatgaacagagatgtggttatgggtattagcatattgcgataagttatatggttgtaccgtgcgagtgtaggcacgagttggtgcagccggttgaggctaatatcatgagtcgatatgaaaatcagaccttttgaatatgtttggagtgtaagaaatttggttccaaggtctataaggttagataggagaaataatctcaatggaaatggtgatgttatacttatgtcgattggggtgacgtgggatcacccgcgagtttatgtgtaagagaaaaatcagcaatttgataacctcagaataattcttagcacgttcgaggacgaaagtttgtttaagaggtggaggatgtaatgacccgacttgtcgttgtgagaattagcatctcgttcagcgacttacgacctcaagcagcttcgtaatgtgtattatgacttgcgtgtgtggtcgagtttggttttcggacaattcaggatcaaattcgagaacaattcttatttaagaagcttaaaagaaaagagttgacaagagagttgacttttgagcaaatgactccggaaaatttttttgatggttcaaatagctttgtctggtgattttggacttaagagtgtgtccggctatttatttggaagtctgtagttgattttggcttgaaatgatgaaagttacaaatggatggtttggaagtttgactgtgagttaactttggtgatatctgggtcaaaatgcaattccgggagttgtattagctctgttatgtcatttggaacttgcatgcaaaatttgatgtcattacgggttaatttggtatgtttcggcacgagtttagaaagttggaagatttggaaatttatgagttcgatttgtggtgcgattcatagtttcgatgttgtttgatgtggtttgaggcctcgagcaagtcctcgttatgttttaggacttgttggtgtatttggttaaggtcccgggagcctcgggtgcgtttcgaggcaaattttgaacaaatttgggcatttcggcactctcataatcttctgggaacaattgtcatgcatgggcacattttggagtggtgaagcaaagcaccatgtgcggaccagagaggaaatgtgcggaccgcagaggaaatgtgcgtatcgcagaattcctcttgcggccgcagaaaggggattctgcaggtttgatggtatgacttcggaagcttatattttttaatctacaaggaatttggagatgatccaaaaatggaagttatatccctttgagtttagttttttgaaaggtaagccaattatcctttggacatttatagcgaaatttacggtcaatttactgaagcctgatagtgctgtgactgctgagtgcgactgcacaatttagattgcggccgtggaacttggaatgtgcggaccgcacaaaaaatgtgcggtcagcacattgggagatcagattggtaccatataaatgagggtttcatcttatttttcatattttgactttggaagctcgatttgtggcgatctttcgttgatttttcaagcaattcatcggggtaagtcattctagatcggaattagttaatatatatgaatatatcattgttttcatcatttaattagtatttttagatggaaatttggaaaaaattgtagaaatttcataaaataaattttagggatttgaaaggcgatccgatatcggaattcgataatttttgtatggttgaactcgtatcggaacaggtgttcggattccgtgaatttttgtcttgttccgaaaagtggtccccgcattgacttttggttgacttagtattattatttaaatttgttttctatgaattgtaattaatttataaaaatattttgattagattagagccgttcgaacgtcgtttcgcgcaagaaggctattttgggatatcagcctaactccgttaaagtaagtgttttgtctaactttgtgtaggggaaaccaccccttaggatttgagatgattgtgtcattcatgttatgtgaaggtcgtgtatgcggggtgacgagtggatacacgacctatatgtggtatttgaccggtttggatcgttaggctccttttatagaattgattataaatatcgtttcatgattatatcttttgttgttagaattgtttgtatgtgctttacttgaatttgttagcacatgttccatcattgttgtcaagttcacccttatatgctaattattaagtgtaatcactcgttgaattcatgctttacgtgctacatgccttaattgtcaattgatgcccataaattgtgccttggcttatggattgtcatttccttgctatttgatttcgtgagctatcgtgtagcctttttcattagttgtgacttctnnnnnnnnnnnnnnnnnnnnnnnnnnnnnnnnnnnnnnnnnnnnnnnnnnnnnnnnnnnnnnnnnnnnnnnnnnnnnnnnnnnnnnnnnnnnnnnnnnnnnnnnnnnnnnnnnnnnnnnnnnnnnnnnnnnnnnnnnnnnnnnnnnnnnnnnnnnnnnnnnnnnnnnnnnnnnnnnnnnnnnnnnnnnnnnnnnnnnnnnnnnnnnnnnnnnnnnnnnnnnnnnnnnnnnnnnnnnnnnnnnnnnnnnnnnnnnnnnnnnnnnnnnnnnnnnnnnnnnnnnnnnnnnnnnnnnnnnnnnnnnnnnnnnnnnnnnnnnnnnnnnnnnnnnnnnnnnnnnnnnnnnnnnnnnnnnnnnnnnnnnnnnnnnnnnnnnnnnnnnnnnnnnnnnnnnnnnnnnnnnnnnnnnnnnnnnnnnnnnnnnnnnnnnnnnnnnnnnnnnnnnnnnnnnnnnnnnnnnnnnnnnnnnnnnnnnnnnnnnnnnnnnnnnnnnnnnnnnnnnnnnnnnnnnnnnnnnnnnnnnnnnnnnnnnnnnnnnnnnnnnnnnnnnnnnnnnnnnnnnnnnnnnnnnnnnnnnnnnnnnnnnnnnnnnnnnnnnnnnnnnnnnnnnnnnnnnnnnnnnnnnnnnnnnnnnnnnnnnnnnnnnnnnnnnnnnnnnnnnnnnnnnnnnnnnnnnnnnnnnnnnnnnnnnnnnnnnnnnnnnnnnnnnnnnnnnnnnnnnnnnnnnnnnnnnnnnnnnnnnnnnnnnnnnnnnnnnnnnnnnnnnnnnnnnnnnnnnnnnnnnnnnnnnnnnnnnnnnnnnnnnnnnnnnnnnnnnnnnnnnnnnnnnnnnnnnnnnnnnnnnnnnnnnnnnnnnnnnnnnnnnnnnnnnnnnnnnnnnnnnnnnnnnncataccgtagttggttgtaaattggttgactattattgtgagggatcgggttccacgccacaacaaatatgatttattattgtgagggatcgggttgtacgtcgcaacagatatgatttaatatttagagggatcgggttgcatgccgcaatagtatgatttatttttgtgagggattgggttgcacgccgcaacaaatatgatttaatattaagagggatcgggttgcatgccgcaacagtttgatttattattatgagggatcgggttgcacgccgcaacatatatgatttattattgcatgggaccgggttgcacgccgcaacaaatgtacaaatatgaaattattgtgatactaaggttaattccgattgtgatgctcacgatgcatttcatgctaggacggttactgtggtttcttaaaccacctcattgtattttgattataattaattaaccgtcaatatattaaaaatgaaacaatatggactttttgtgtgagtcatgcatcctatgtgatatgttaagttgctgagaatttagcagaggtaaatgaaagaattttcaagttgttccacttgtgtgtctttcaaaaataaaactcatatcttattcgtagatctactaatttaaatggtgattatatttgtactctaattgatacctcaactttctcattatcttaatagcgtgtaatttatgtgaaaaattattattacattttactttaataaatcccatatttatatcattaaaatttgattgaatatcttaatttgtataaatataatattgtattggatctcatatatttctaaactaaactcatttgatattctatttgcacaacctctccaccttatttaaatcttaaattggcttaataactcatttgactctttactatgttcaagttggaattctttttaattgtgtttaaattattcatcatttaatggtaaggacgagagtttaagcacgaagggtaatatcgtgctatttttatattatatttttactctgactgtgttgttgctcaatttcttgattgtttgttcgatgccatccatgttctcattattttcattgttgatttgtgttgggaaattcttctattattggccttaaatttatactcttcccttgttagcttcatgaaacaaattgtacagctttatatgtctggtaggtgtcttgacctggcctcgtcactactctaccgaggttaggcttgatacttactgggtaccgttgtggtgtactcatgctnnnnnnnnnnnnnnnnnnnnnnnnnnnnnnnnnnnnnnnnnnnnnnnnnnnnnnnnnnnnnnnnnnnnnnnnnnnnnnnnnnnnnnnnnnnnnnnnnnnnnnnnnnnnnnnnnnnnnnnnnnnnnnnnnnnnnnnnnnnnnnnnnnnnnnnnnnnnnnnnnnnnnnnnnnnnnnnnnnnnnnnnnnnnnnnnnnnnnnnnnnnnnnnnnnnnnnnnnnnnnnnnnnnnnnnnnnnnnnnnnnnnnnnnnnnnnnnnnnnnnnnnnnnnnnnnnnnnnnnnnnnnnnnnnnnnnnnnnnnnnnnnnnnnnnnnnnnnnnnnnnnnnnnnnnnnnnnnnnnnnnnnnnnnnnnnnnnnnnnnnnnnnnnnnnnnnnnnnnnnnnnnnnnnnnnnnnnnnnnnnnnnnnnnnnnnnnnnnnnnnnnnnnnnnnnnnnnnnnnnnnnnnnnnnnnnnnnnnnnnnnnnnnnnnnnnnnnnnnnnnnnnnnnnnnnnnnnnnnnnnnnnnnnnnnnnnnnnnnnnnnnnnnnnnnnnnnnnnnnnnnnnnnnnnacatctttttatgcagatccagataccccagagttattgatattctttttagttaatcgagcattgtggtggagactcaaggtatacccgttgtctcgttcgcaggcttcagagtcacattttgatatttttttgcactgttgattctactttagaacagttgcatttagagattttagagtaaactctgtagattttgtgacttgtactatcgattttgggattgtagtaaatttctatttcagattattccagataattggttttttattgccatttaaacttaactgtgaaaaaatgactaaaattattctaatgttggtttgcctagcaagtgaaatgttaggcgccatcacgatcccgaaggtggaaatttcgggtcgtgacaagaaatcaatagttgtttttgaaaatggaagaaaacaagttaaactctactaacctatgaagttgggatgaaaattctcttcaaaatcgcctctaggccgagctgaaacttggaaatgatgaattggttaaatcctcactttgggatatttaagtcactgggcgtcaggccttcttcgcgttcacgaagggcctgaagcgatcgcgaagagcagcggccaaaatggccttcacgttcatgagggtttgaacgcgtctgcgatgctttgtcccccctggccattgcgttcgcgagcctaggctcgcgttcgtgtagaacaaaccctagccttcccccagaatcccttgcccatcatgttcgcgagtgaagggccgtgttcatgaagggtaatccttccgatgctttgtgttcaaatttacaaccgagcgtccgaatcatgtcaaatcaactccgattttaaccaaattttgcagacaagacaataatagtaaaatgaacctatatcaagtctcgaaaccgaaattcgagcccagtagctataaagtcaacctacggtcaaactttcaaattctttaaagcttcaaattactagttttcaataaatcacgttaaatcaagttagaggctttcgaatttgattatgggcatacgcccaagtcccaaatcacgatacaaatccaccaggaccgtcaaaatactgatccgggtctgtttacataaaatgttgagcgtagtcaactaaaattattttaaagaaaaattcacattttctagaacaagacacagacaaaaatcgaggaatgttaaacggagctaattgagatctcgaaatacgaaaataaggctaaatctcaaaatgacttatcgggtcatcacatgggccttcattttcattgtcaagacccaaaattcaagtagttgtgatggcacctaacctataccgttagctaagccaattatccataaacacaatccaaatgagattaacacgaaataaatgatgaaataagtgagttcttatacaataactcaaggactagtagtacaagttaggagattataatacttggagttacaaaactaataggaaaataatacaacatctgtttgaaatatacataaatataatctcaaatatagaactaccaagaacaagtggtagcggtaattcaaagagatatgcttccttcctctagactagccgatcaccaaaacacagaaaacacatctcgcacctcattcatggaatccataagtcgtcaatgtacagatgatactgagcactcacatgcgcatacgagcgagtggaaggaattcaaaaaggtacaagcttcaggatcatttggctctactagacacttggtcgtgactcgtagaacctatgaacctagagttctgataccaacttctcacgacccaaaatccaactagtcgtgatggaacctatcctaacccactaggtaagcgaattaataataaaccacaatataatgataataataagagttaagaatgaaataactgaattttatacaactccccaaggactggtagtataaatcatgagcttctaagacttagagtttacaaagctggtatgaaataaatacatcatctgttcgaaaagtacataaacaaatttataaatctaaagctaccaagaataagaggcacttataactggaacgtatgtatatcttcaatgccaattcccgccatacacaacaacattagctcaaaaatatgcacgcaaggtgcataaatgtagtatgagtaaaaccgaccccatgtactcattaatctaaaaaatctggcaacccaattcttagtaaaatgaccataaattcctcatacgatgtcgaaacttgatgattccagttgctatggttccaaaattacgatacggatattggtttagcctaaacacgaataaaaggccgttttctcaatacggtaacctttatactcaaatcgatgttgaaaccgaaaacaatcaccatacaacccaaacttatccaaaactcatcgaaatatggccaaactttaaggacatgtccaaaatcatcatacaaacatattggaataattaaaacccgatttcgagtccatttaaccaaaagtcaaaccttgattaaatcttccaacttaaagcttctaaaatgagtattattcttccaaatcaatctagaaccacttgaaaaccgataccaaccatacacgcaagtcataatacataatatgaagctacttaaagttttaaaccaccgaatggaatgctaaagctcaaaacgaccggtcaggttattacatctttaattcccattcccgccattcacaaaaacatcagcgtgcaaaagtgtagtatgattaaaaccgactatatgtactcaataagaaacaaacctaacctcaagttgaaagtagtgacgagctccaaaaacggttagagtccaacaccaatagccaataacaactcgtaataatatcatgaaggcagtaaaagtaataactcaaaagatattatactcagcttgtttgcagtcacaaaaaagtagacatgctttccaagtataacagtaaagtccaaatctttcgacggaattaccaaagtatgagtatatctgaaaattgtgatttcccccaaactttcaacaacatagaagacatttcattaccagatagcattagaaaagtacatctctatacctacatgtcaatatgcgtatcaagtcatcaattatcatataccgtctagcaggaggaatatgcatctctatgcctaggtcaattaagaatgaaactaatactcatttaaacggtataactcaaattaaaggaaaaataggttgctacccagtaaaataaatcaggttttacaacaaatagctcgtgtacgtactcgtcacctcacttgcacggcgctcacatatcacaacagtaccaaatcctaaggggatttcccccacacaaggttaggcaagccacttacctcgaaccaagttcaatcaatcctgttttcattcttaattgagctattccaatatgtgtagttatcctgtttagtctaatatcgcatgtctacgtgctttaactgcttatttgaactctgtgaagcatgcctagttgattttcctgttttccttgttctttatcagtattaactgtagaaatcttgttgttaactgttgtatttatcggtttgagctgtgtgtttacttttgagactacgaggcggttcctcgggagttctccctgcacatttacttttgggactacgaggcggtacctcgggagatctcccatatttacttttgggactacgagacggtatctcgggagatcccctgttgagtgtttatttattttactacgagacggtatctcgggagcgcccctgttgttatcacattgtgtgtgttattatttctctgtgaattctttctgttaaatttccccattttacttcattttattatatcatctgtcttattattatatcccagtagggcccggacctgacctcgtcactactctaccgaggttaggcttggcacttactgggtaccgttgtggtgtactcatgctactcttctgcacatgttttgtgtgcagatccaggagcccctctattctcccctatatgtcatttaccttccgtatttcttttattagactctggtgtatagagatactagtttccttctgtagcttgtgacttatgatgttcgggttttgggaatactgtgtattactagagtattggttattgtacatgccaagcgtattgttaccagttagttgttaagttttacttccattttgttatttcctatttagagactaggtgccgtcacgacgttcttacggagggagagttgggtcgtgacaagttggtatcagagctctaggttcataggtgtcgtgagtcacaagcaagtttagtagagtctcgcggatcggtacgagacgtctgtacttatcttcgggaggctatggaactgttaggaaaaattacacttctttgattccttgtcgtgcgaaattgttgacttcaaaattctaaacttctgtattctattctctcacagatggtgaggacacgtacaggcggatctgatgaccaggcacccgcgccccctgctagagccgcgagaggccgggccggggtagaggccgaggacgtccacgcggtgcagccagagcacccgcacgagctgctacagaggagcccccagtagctccagctggagggcaggcacctgaggtacctgttgctgcaccagccctccaggagactctagcccagtttctgagcatgttcagcaccttagctcaggctggattgattccacttgctcctgccacatctcaggccgggggagcacagactcccatcggtacccccagagcagcggttcaggtcgaccaggtccagagatcataccatgcagccggtagctccagttcagcccgaggttagggcagcagtttctgaggcggagcagctcagacttgagaggtacaagaagtaccaccctcctaccttcagtggattggcgtcagaggatgcccagggttttctggaggagtgtcaccgtattctccgtactatgggtgtagcggagtcgagtggggtttcttttactacattccagcttagaggagcagcctatcagtggtggcgtgcttatgagttgagtagtccggctgaggcagcttcacttacatggactcagttctcggacatgtttttgagggagtatgttccccagagtctcagagacgcatggcgcgtggagtttgagcagttgcgccagggtgctatgactgtgtcagagtatgcagttcgcttcagtgatttggcccgacatgcaccggccttggttgccacagttcgagagagggttcgtcggtttattgagggactccaccccagtatcaggattagtatggtcagggagttggagatggatatttcttaccagcaggttgtgagtattgctaggagattggagggcatgctcgctcgggatagagaggagagggaggccaagaggtctcgagagtctggcacttacagtggtactcgtgccccagctgcagttcgccatggtaggggttatgtgagtcgccccgttcattcagctcttccagccgccagtggtattccggccccttctaggccccaggagccttattatgcaccgccagtatctagtgtgcctcctgcacggggtgcttttagcggtcagtccagcagacctggcccgagccagtcacagcagccacgcctccgagagcttgttttgagtgtggcgacaccccatatggtgagggattgccccagacttaggaggggtgcacctccacagacttctcagccaccgcgtgctccaccgggtcctcaggctatgattccagcaccagctaccgccccacctgctcagccagctcgaggtggaggtcggggaggtcgccctagagggggaggccaggccagatattatgctcttccgctcgtacagaggcagttgcttccgactctgtcattacaggtattgttccggtctgtcatagagatgcgtcggttttatttgatccaggctccacttattcctatgtgtcctcttattttgccccgtatttgggcgtatctcggattcttgagttcccctatttatgtgtctactcctgtgggagattctcttattgtggaccgcgtgtatcgtcgtgtttgattgctcttagtggttttgagaccagagccgatttattattgctcagtatggtagactttgatgttatcttgggcatggactggttgtttaagaccgtgacgctggctatgccaggattaccgcgattagagtggagaggtaccttagagtatactcccagcagagttatttcatttcttaaagctcaacgaatggttgagaaggggtgtgacgcgtatctagcttatgtgagagatgtcagtattgatacccctacagttgagtcagtcccagtagtgagggactttccagatgtgtttccagctgatcttccgggcatgccgcccgacagagatattgattttggcattgatttgttgcgggcactcagcccatctctattcctccatatcgtatggctcctcctgagttgaaggagttgaaggagcagttacaggagttgcttgataagggcttcattcggcccagtgtgtcaccttggggtgctcctgtcttatttgtgaagaagaaggatggttctatgcggatgtgtattgattaccccagttgaacaaagtcacagtgaagaacaggtatccattgcctcgtattgatgacttatttgatcagttacagggtgccagagtgttttccaagattgacttacgttcaggctatcatcagttgaagattcgggagccagatatcccgaagactgctttcaggactcggtatggtcactacgagttccttgtgatgtcatttgggctgaccaatgccccagcagcttttatgcacttgatgcacagtgtgttccggccttatcttgactcatttcatcattgtgtttattgacgacattctggtgtactcccggactcgggaggatcatgagcagcacctgaggactgtgcttcagaccttgagagaaaagaagttatatgcaaaattttcaaagtgtgagttttggctagactcagtggcattcttgggtcatgtagtatcgagtgatgggatccaggtggatccgaagaaggtgaagcagtgcagagttggcccagaccgtcctcagctacggagatccggagttttcttggtttggcggggtattaccgtcgatttgtagagggtttctcatctattgcagcacctatgaccaggctgacccagaagggtgctccgttcaggtggacagaggagtgtgaggagagctttcagaagctcaagacagctttgactacagccccagtattggtattgcctacaggttcggggtcttatactgtatattgtgatgcgtcgcggattggtctcggcgcggtgttgatgcaggacggtagggtgattgcctacgcgtccagacagctgaaggtgcatgaaaagaactatcatgtccacgaccttgagttagcagctattgttcatgccttgaagatttggcggcactatttgtacggtgtcccttgtgagatttacaccgatcaccggagtttgcagcatctgttcaaaaaaggatcttaacttgcgtcagcggaggtggttggagctgcttaaggattatgatatcaccattttgtaccatcccgggaaggccaatgtggtggccgatgctttgagtcgccgggcagagagtttggggagttagcatatctaccagcagcagagaggccattggcgttggatgttcaggccttagccagccagtttgtgagattggatatttctgagccgagtcgagtattggcttgtgtggtctctcggtcttctctttatgatcgtatcagggagcgtcagtatgatgacccccatctgcttgtccttaaggacacggttcagcacggtgatgctaaggaggtcactattggggatgatggtgcattgaggatgcagggcaggctatgtgtgcccaatgtagatggtttgcgtgagttgattctccaggaggctcacagttcgcggtactccattcatccgggtgccgcgaagatgtatcaggacttgaggcagcattactggtggaggaggaatgaagaaggacatagtggaatatgtagctcggtgtctaaattgccagcaggtaaagtatgagcatcagcggccaggtggattgcttcagaagttagagattccgagtggaaatgggagcggatcactatggatttcgttgttggacttccggactcagcggaagtttgatgcagtttgggtgattgtggataggctgaccaagtcagctcatttcattcctgtgatgactacctattcttccgagcagctggctcgaatttatatccgcgagatcgtcaggcttcatggcgtaccggtatctatcatctctgaccggggtacgcagtttacatcacggttctggaggggtacagcatgagttgggtactcgagtggagctgagcacaacatttcaccctcagacggacggacagtccgagcgcactattcagatattagaggatatgctccgtgcgtgtgtgatagatttggaggttctgggatcagttcttgccacttgcggagtttgcctacaacaacagttatcagtcgagcatccagatggcaccgtatgaggcttatatggtaggcggtgcggtctccagtgggttggttcgagccgggcgaggctagattattgggtacagacttggttcaggatgcttggaaaaggttaaggtgattcaggatcgacttcgcacagccagtccagacagaagagttatgcgatcgaaggttcgcgatgttgcattcatggttggagaggtcttgctccgggtgtcacccatgaagggtgtgatgaggttcggaaagaagggcaagttgagccctaggtatatcgggccttttgagattcttgagagagtgggggaggtggcttacaggcttgcgttgccaccgggtttatcagcagttcatccggtgttccatgtgtccatgctccgaaagtatcacggcgatccgtcccacgtgttagatttcagctctgtccagttggacaaggatttgacttacgaggaggagccggtggctattctagcccgggttcgtcagttgaggtcgaagagttatccttcagtccgagtgcagtggagaggtcagcccatcgaggcagctacttgggagtccgagtcggacatgcggagtagatatccccaccttttcaccagcccaggtacttttctatgtccgttcgaggacgaacggttgttttagaggtggagaatgtgatgacccgataggtcatcttatgttttagaacctaattcttgctttgaagccttaaatacctcattttagccttcctcgatttgcgtgcgcagtccgggtgtttttcggaaagcttttatgttaaaaactgagaaaatatgaaaattttgccttaaaatccatttgagttgacttcggtcaacgttttgagcaaacggaccggattcatgttttgacggtcccggtgggtccgtatcgtgatttgggacttgggcgtatgcccggaatcgaattcggaagtccctagcccgagttatcggactttgttgaaatttgaaagtttgaaagcttaatgactttgaaagtttgaccaatgtttgactttattgatatcgggtccgtattttggtttccggaacccggtataggtccaatactatatttatgacttgtctgtcaaatttggtgagaaacggagttggtttgacgtgattcggacgtccggttgtgaaaatagaagtttcaaagttttcttgaaaatttcctttgatttggtgtaaattcgtagttctaggtgttattttggcgatttgatcgcgcgagcaagttcgtatgatgtttttagacttgtgtgcatatttggtttagagcccgagggctcgggtgagtttcggataggctacggagtggtttggacttagaaaactcagctggttctgcaatttctggtctctgatctcgcaattgcgagatcagtgttcgcatttgcgaacatcccaaatcctgggccttcatttgcgaagagtacctgggtcagcatagttcgcatttgcgatcaagaggtcgcaattgcggggaggccagagttcgcatttgcgaagtggggctggggcaggcttggtcgcatttgcgatcaatttggtcgcaaatgcggaagatcaatgttcgcaattgcgaacaagtcatcatttgcgatgaaagcagagatggaaggacttcgcatttgcgatggttttcgcgcatttgcgaaccccaggtcgcaaatgcgacatctgcaactgatcaaaatgggacttagacgggattttggttcattctctcaaattttcaaaacaagaaaccctagaggcgatttttcaaagaacctttcttccccaaatcattggtaagtgattctaaactagtttctttcaatctttcactacatttcctaagatttcaaccaaaaatcttgtgttttcatggtggaaattgggggtttgggtagaattagggatttttgtaaaatggggatttagacctcaaattgaggtcggattccaaaacaaattacataaccgggctatgccttttccacgaatatccgactccgaatggcccaaaactagccaaaataaattacatacaataaatacaactataagaaactaatctaattaatgaaatcaaatctaaagcaagaaattagaaaatctccccaaaaggtcgacccgggcccacgtctcgaaatcgggtaaaagtcacaaaatatgaacacccattcactcacgtgttcactcgtaccaaaaattatccaaatccaatatcaaaatccgaatcaaaactcaaaaacttagttgaagaatttctcccatttttcccaaatttctcaaccaaattccttaattaaatgatgaaatcaactatagattaatggaatataaccataaatgagttaagaatcattaccccaaatttctctctgaaacatccttgaattatcgcctcaatccgatctctcaaagaccccaaatgtaaatgagatcaaaccctcaaaatttccccttttctgcccaacgatctcgcacctgcgggcctctagtcgcacctacggaatttccatcgcaagtgcggaaatgactaaagaggtctggtacatcttctacgatgaggtagccgcacctgtggacaatggtccgcttctgtgaagtcctcatccactcagctcccgcttctgcgatcactccccagcaggagcggctccgcttctgctccccttttgttgcacctgcgaccactggttacccagaacagggccgcatctgagagctctcttctacatgtgtgagtccgcacctgcgatctccccacagcaggtgcgaaaacaccagaaaccagaaaacttcagcaatttgtataagtccaaattcaatcccttaagcatctgaaacacatccaaggcccccgggacctcaaccaaatataccaacaagtcctaaaacaccatacaaacatagtctagccctccaatcacatcaaacaatgctaaaaatacgaatcaccctccaattaaaacttcctttgacacttcaaacttctaaaaccgatgccgaaacctatcaaaccacgttcgattgacctcaaattttgtacacaagtcataattgacattacggacctactccaacttcaggaatcggaatctgaccccgatatcaaaaggtccacttccaatcaaaatctccaaaaatttgactttcgccaattccagcctaaatcagctacagacctccaaaacacaatcctaaaacgcccctatatccaaaatcactcaacagagctaacagaaccgaagaaactccattctagtgtcgtcttcacacagtcccaactacggtcaaaatcctaagacttaagctttcgtttagggactgattgtcattcatcattccaaaaccacaaacagaaccgcccggcaagtcacataaggagaaaacgatacgggggaagcagtaaacaggggatcggggctattactctctaaacgaccggcctggtagttacatcctccccctctttaaacaatcatttgtccttgaatgatcatagagacatacctgaagtggtgaaaatatgaggatagcggctgcgcatatcctgctcggtctcccaagttgcctcctcgaccggctgacccctccactgaacctgcacgcaagcaatgttcttcgaccataactttcgaacccgcatgtctaaaatagccactggctcctcaacataagatagatccttgtccaactggactgagctaaaatccagcacatgatacggatcaccgtgatactttcggagcatagaaacatggaataccgaatgaaatcctgctagactgggaggtaaggcaagctcataagcaacctccccaacaggccgcaacacctcaaaggggccaataaaccttgggctcagcttgcccttcttcccgaacctcataacacccttcataggagaaacccggagcaagacccgctctccaaccatgaatgcaacatcgcgaaccttctgatccgcataactcttctgtctggactaggctgtacgaagtcgatcttgaatcaccttcaccttatccagggcatcttgaaccaagtctgtacccaataatctagcctcgcccggctcaaaccaacccactggagaccgacaccgcctaccatacagagcctcatatggtgccatctggatgctcgactgataactgttgttgtaggcaaactctgcaagtggcaagaactgatccaaagaacctctacaatctatcacacactcacggagtatatcctctaataactgaatagtactctcagattgtccgttcgtctgagggtgaaatgttgtgctcagctctactcgagtacccaactcatgttgtaaactgtgtaccccggtcagagatgatagataccggtacaccatgaagcctgacgatctcgcggatataaattcgatccagcttctcggaagaataggtagtcatcagaggaaggaaatgagctgacttggtcagcctatccacaatcacccaaactgcatcaaacctccactgagtccgtgggaatccaacaacaaaatccatagtgatccgctcccattttcactccgaaacctctaacttttgaagtaacccacctggccgctgatgctcatacttcacctgctggcaatttagacaccgagctacatactccactatgtcctttttcatcctcctccaccagtaatggtgcctcaagtcttggtacatcttcgcggcactctgatgaatggagtatcgcgagctgtgagcctctagagaatcaactcacgcaaaccatctacattgggcacacatagcctgccctccatcctcaatgcaccatcatccccaatagtgacctccttagcatcaccgtgctgaaccgtgtccttaaggacaagcagatgggggccatcatactgacgctccctgatatgatcataaagagaagaccaagagaccacataagccaatactcgactcggctcaaaaatatccaatctcacaaactggctggctaaggcctgaacatccaacatcaatggcctctctgctggtggtagatatgctaaactccccaaactctctgctcggcgactcaaagcatcggccaccatattggccttccccagatggtataaaatggtgatatcatagtccttaagtagctccaaccacttcgctgatgcaggttaagatctttttccttgaacagatgctggaaactccgatgatcggtgtaaatcacacaagggacactgtacaaatagtgccaccaaatcttcaaggcatgaacaatagctgctaactccaggtcgtagacaggatagttcttttcatgcatcttcaattgtctggatgcgtaggcaatcaccctaccatcctgcatcaacatcgcatcgagaccaatccacgacgcatcacaatatatagtataagatcctgaacctataggcaataccaatattggggctgtagtcaaagctgtcttgagcttgtgaaagttctcctcacactcctctatccatctgaacagagcacccttctggttcagcctggtcataggtgctgcaatagatgagaatccctctacaaaatgacggtaataccccataaaaccaagaaaacaccaaatctctgtagctgatgatggtctaggccaactctacactgcttccaccttcttcggatctaacttgatcccatcactcgatactacatgaccctagaatgccactaagtctagccaaaactcacactttgaaaattttgcatataccttcttttctctcaaggtctgaagcacagtactcaggtgctgctcatgatcctcccgagtccgtgagtacaccagaatgtcgtcaataaacacaatgacgaaagagtcaagataaggccataacacactgtacatcaagtgcataaaagttgctggggcattggtcagcccaaaacacatcacaaggaactcgtagtgaccataccgagtcctgaaagcggtcttcaagatatctggctaccgaatcttcaattgattatagccggaacgtaaatcaatctgggaaaacacctggcaccctatagctgatcaaataaatcataaatatgtggcaatggatacatgttcttcactgtaacattgttcagctgacgataatcaatgcacatacgcatagaaccatcattttgctttacaaacaagacaggagtaccccaaggtgacacaccgggccgaatgaatcccttatcaagcaactcatgtaactactctttcaattccttcaactcaggaggagccatacgatacagaggaatagagataggctgagtgcccggcaataaatcaatgccaaaatcaatatatctgtcgggcgacatgcccggaagatcagctggaaacacatcttgaaagtccctcactactgggactgaattaactataggggtatcaatactaacatctctcacataagctagatacgcgtcacaccctctcaaccattcgctaaactttaaggaatgaaataactctgctgggagtatactctaaggtacccctccactctaatcgcggtagacctagcatagacagcgtcacggtcttagcgtgacaatcaagaatagcataatggggcgacaaccaatccatgcccaagataacatcaaattctaccatactgagcaataataaattggctctggtctcaaaacaactaagagaaatcaaacatgaccgatacatgcggtccacaacaagagaatctcccacatgagtacacacataaacaggggaactcaaggaatcccgagatacgcccaaatacggggcaaaataagaggacacataagaatatgtagagcctggatcaaataaggctgacgcgtctctatgaaagaccgaaacaatacctgtaatgacagagtcggaagcaactgcctctgtaccagctggaagagcataatatctggcctgtcctccccctttagggcgacctcgacctccccgacctccacctcgagctggctgagcaggtggggcggtagttggtgttggaatcatagcctgaggacccggtggagcacgtagtggctgagaagtctgtggaggtgcacccctcctaagtctggggcaatccctcaccatatggcgagtgtcgccacactcaaaataagctctcatagggcgtggctgctatgactggctcggtccaggtctgttggactggccgctaaaagcaccccgtgtaggaggcacactagatactggcggtgcataataaggctcctggggtctagaaggggcctgaataccattggtgggtggaagagctgaatgaacggggcgactcacataacccctaccatggcgaactgtagttggggaacgagtaccactgtaagtgccagacactcgagacctcttagcctccatctccgatctatctcgagcatgccctccaatcacctagcaatactcacaacctgctggtaagaaatatccagctccagctccctgaccatactaatcctaatactggggtggagtcctcaataaatcgacgaaccctctctcgaactgtggcaaccaaggctgttgcatgtcaggctaaatcactgaaacgaactgcatactctgacacattcatagaaccttggcgcatctgctcaacctttgttctccatgcgtccctaaggctctgagggacatactctctcaaaagcatgtccgagaactgagtctatgtaagtgaagctgcctcatccggactatcaactcataagcacgccaccactgataggctgctcctctaagctggaatgtagtaaaggaaaccccactcgaatccgctacacccatagtacgaagaatacagtgacactcctccagaaaaccctgggcatcctatgatgccaatccactaaaggtaggagggtggtacttcttgtacctctcaagtctgagctgctccgtctcagaaaatgttgccctaacctcggcctgaactgcagctaccggctacatcggtataatctctggaacttggtcgacctgagcccgctgctctggagtaccggcgacgggagtgtgtgctcctcccccaacctgagatgtggcaggagcaagtggaatcaatccaccctaagctaaggtgctgatcatgctcagaaactgggctagagtctcctggagggctggtgcagcaacaagtacctcaggtgtctgccctctagctggagctactgggggctcctctgtagcagctcgtgtgggtgctctggctgcaccacgtggacgtcctcggcctctaccccggccccagtctcttgtggctttagtagggggcgcgggtgcctggtcatcagatctgtatgttcgtgtcctcaccatctatgagagaatagaatacagaagtttagaatttcgaagtcaacaatttcgcacgacaaggtattaaagaagtgaaatttttcctaacagttccatagcctccagaagataagtacaaacgtctccgtaccgatccgcgagactctaataaaccggcttgtgactcacgacacctatgaacctagagctctgatactaacttgtcacaaactaaactccctctgtataacgtcgtgatagcacctagtctctacgactaggtaagcctaataaattatggaaaataacaaaatgaaagtaaaacttgctaactaagagtaatggataactgaataactagtaacaatgctctcggcatgtacaataaccaatactctataaatacacagtcttcccaaaattcgaaacatcgtaagtcacaagatacagaaggaaaatagcatctctatacaccagagtctaataaaaggaatacaggaagtgtttgacataggggagaatagatggggactcctcggtctgcggatgcgagcagatgtaccttgaagtctccgaaacagccgcaattacacaactaattgcgaggtcagtatgatgaatctggatctgcacacgaaagcatgcacacaagaatatcataagtacaccacaatggtacccagtaagtgccaagcctaacctcggtcgagtagtgacgaggccaggtcaggcccactggtaaatgataaataaggtaggagaatatacagtataataagagactagaatttaacaaaaggaaacacaacaaggcaacagtacaacacacacaggggtaaacagtaggggatctcccgatataccgtctcgtagtcccaaaataaatatacagggagaactcccgaggtaccgcctcatagtctcaaaagtaaatgtacagggagaactcccgaggtaccgcctcgtagtctcaaaagtaaatgtacagggagaactcnnnnnnnnnnnnnnnnnnnnnnnnnnnnnnnnnnnnnnnnnnnnnnnnnnnnnnnnnnnnnnnnnnnnnnnnnnnnnnnnnnnnnnnnnnnnnnnnnnnnnnnnnnnnnnnnnnnnnnnnnnnnnnnnnnnnnnnnnnnnnnnnnnnnnnnnnnnnnnnnnnnnnnnnnnnnnnnnnnnnnnnnnnnnnnnnnnnnnnnnnnnnnnnnnnnnnnnnnnnnnnnnnnnnnnnnnnnnnnnnnnnnnnnnnnnnnnnnnnnnnnnnnnnnnnnnnnnnnnnnnnnnnnnnnnnnnnnnnnnnnnnnnnnnnnnnnnnnnnnnnnnnnnnnnnnnnnnnnnnnnnnnnnnnnnnnnnnnnnnnnnnnnnnnnnnnnnnnnnnnnnnnnnnnnnnnnnnnnnnnnnnnnnnnnnnnnnnnnnnnnnnnnnnnnnnnnnnnnnnnnnnnnnnnnnnnnnnnnnnnnnnnnnnnnnnnnnnnnnnnnnnnnnnnnnnnnnnnnnnnnnnnnnnnnnnnnnnnnnnnnnnnnnnnnnnnnnnnnnnnnnnnnnnnnnnnnnnnnnnnnnnnnnnnnnnnnnnnnnnnnnnnnnnnnnnnnnnnnnnnnnnnnnnnnnnnnnnnnnnnnnnnnnnnnnnnnnnnnnnnnnnnnnnnnnnnnnnnnnnnnnnnnnnnnnnnnnnnnnnnnnnnnnnnnnnnnnnnnnnnnnnnnnnnnnnnnnnnnnnnnnnnnnnnnnnnnnnnnnnnnnnnnnnnnnnnnnnnnnnnnnnnnnnnnnnnnnnnnnnnccaaggtaccgcctcgtagtctcaaaagtaaatgtgtagggagaactcccgagaaaccacctcgtagtctcaaaagtaaacacacagctcaaaccgacaaatacaacagttaagtgcaagatttctacagttataatgacaaagaacgaggaaaagtaggaaattaactaggcatgcttcacagagttcaaataagcagttaaagcatgtagacatgcgatattagactaaacaggataactacacatattggaatatctcatttaagaatgaaatcagactaatactcatttaaacggtctaactcaaattaaaggaaaaacaggttgctacccagtaaaataaatcgggttttacaacaaatagcctatgtacatactcgtcacctcacgtacgcggcgctcacatatcaaaacagtaccaaatcctaatgggatttcccccatacaaggttaggtaagcgacttacctcgaaccaagctcaatcaatcggtaacgatgccttttccacgaatatccgactccgaatggcccaaatctagccaaaatcaattacataccataaatacaactataagaaactaatataattaatgaaatcaaagctaaagcaagaaattagaaaatcaccccaaaaggtcgtccagggcccacgtctcggaatcggataaaagtcacaaaatatgaacactcattcactcacgatttcactcgaaccaaaaattatccaaatacgatatcaaaatcccaatcaaaactcaaaaacttagttgaagaatttctcccatttttccgaaattctcaaccaaattccttaattaaatcactactagaaatacacagttttcccacggtaaatcagtgggaaattagtgggaaaattgagttttcacatcgcattcccaccaaaacggatccccggaaaaggcctggtgggaaaaagcttcccagagaagtagtgggaagtttcccacagttttcccaacaaagatttaataggaaaaataatgaagttttccaccgacaatccgtgggaagtattattagtaatttttattattttaatatattagacaggaaagtggtgggtaaaatgcatgtaatgaaaacaaaagtatgaactttcacaccgatatcagtgggaatcatgcaagatctgtaactaaaaggacgaaccttcccacatattcagtaggaagtttggaaaatatttttgtgcattgtgctgctttttatactgcaccacctaccaaacaaaaaatataactaccaacaacaagcctaaatacaattaaacattcacatacaaaattcagcattgattctgatccatttcataaacatccaaccaaaacagaaatacaataaaccaataatgcaactaaacagtcaaataaaaaattcaacatccaatcttatccaattgaatgaactcttccaacgattgtttgaaattccgcaagtctatataactctcctgtgatggttggattggatttcttttatcatcggttgattggctttcaatgaactcctccaacgattgtttgaaagtattctacaaacaaagttacatttattatatgaaaggaaaatcttttaggcttcataaagctaaatcgagttcaaaatctaataataatcctctaacctttgattttacatgagtgaatatgatattacctttgattttacaggnnnnnnnnnnnnnnnnnnnnnnnnnnnnnnnnnnnnnnnnnnnnnnnnnnnnnnnnnnnnnnnnnnnnnnnnnnnnnnnnnnnnnnnnnnnnnnnnnnnnnnnnnnnnnnnnnnnnnnnnnnnnnnnnnnnnnnnnnnnnnnnnnnnnnnnnnnnnnnnnnnnnnnnnnnnnnnnnnnnnnnnnnnnnnnnnnnnnnnnnnnnnnnnnnnnnnnnnnnnnnnnnnnnnnnnnnnnnnnnnnnnnnnnnnnnnnnnnnnnnnnnnnnnnnnnnnnnnnnnnnnnnnnnnnnnnnnnnnnnnnnnnnnnnnnnnnnnnnnnnnnnnnnnnnnnnnnnnnnnnnnnnnnnnnnnnnnnnnnnnnnnnnnnnnnnnnnnnnnnnnnnnnnnnnnnnnnnnnnnnnnnnnnnnnnnnnnnnnnnnnnnnnnnnnnnnnnnnnnnnnnnnnnnnnnnnnnnnnnnnnnnnnnnnnnnnnnnnnnnnnnnnnnnnnnnnnnnnnnnnnnnnnnnnnnnnnnnnnnnnnnnnnnnnnnnnnnnnnnnnnnnnnnnnnnnnnnnnnnnnnnnnnnnnnnnnnnnnnnnnnnnnnnnnnnnnnnnnnnnnnnnnnnnnnnnnnnnnnnnnnnnnnnnnnnnnnnnnnnnnnnnnnnnnnnnnnnnnnnnnnnnnnnnnnnnnnnnnnnnnnnnnnnnnnnnnnnnnnnnnnnnnnnnnnnnnnnnnnnnnnnnnnnnnnnnnnnnnnnnnnnnnnnnnnnnnnnnnnnnnnnnnnnnnnnnnnnnnnnnnnnnnnnnnnnnnnnnnnnnnnnnnnnnnnnnnnnnnnnnnnnnnnnnnnnnnnnnnnnnnnnnnnnnnnnnnnnnnnnnnnnnnnnnnnnnnnnnnnnnnnnnnnnnnnnnnnnnnnnnnnnnnnnnnnnnnnnnnnnnnnnnnnnnnnnnnnnnnnnnnnnnnnnnnnnaaatgagagtgaaaatgaaaagaaagaagaaggtatgtactataataggaaagacattcccactaattcactgggaatatttgtgggaattgtcttattaaattcatttttttgtgaaatgtttttaacctcgcgggttttttggaccaaaatttaaattttaaaattttgaatttcccactacatctgtgggaacattaaaataattgtttatctttagattcctaccgtttcactgggaagagtttaataattctatgtagtaatttttctaatgtatttcccactgattcggtgggaaacaaattgcacgcttttttgcgccaaataattcccacttatagtctgtgggaacgttttaaaaaaaggtaaaagaaaacccttccatttcccactgcatttgtggaaaaattaaaataattttttatctttagattcccatcgtttcattggaaaaagtttaacaattttatatagtaattttctaatgtatttcccactgtttcggtgggaaacaaattgcattcccactgattcggtgggaaacaaattaaatttccactgattcggtgggaaacaaattgcactctttttgcgccaaataatttccacctatattctgtgggaatgttttaaaaaaaaggtaaaagaaaacccttccatttcccactgagtttttctaaattgcagtgggaactgtcactaataatatatctgtggaaaattttcctgggaaatttacatttttctagtagtgaatgatgaaatcaactatagattagtgaaatataaccataaacgagttaagaatcattaccccaaagatctctccgaaatatccttgaattatcgcctcaatctgagctctcaaagacccaaaatgtaaatgagattaaaccctcaaaatttccccttttctgcccagcgatctcgcacctgcagacctctagtcgcacctgcgacgccgcacctgcgaaatttccatcgcaggtgcggaaatgacttaagaggcctgggaccgcttctgcgatgaggtggcctcacctgcacatgcgcacctgcggacaatggtccgcttctgcgaagtcctcacccactcggctcccgcttctgcgttcattcccccgcaggagcggctccgtttctgtgcccctattgtcgcacctgcgatcactggttacccagaccagggccgcatctgcgagctcctttctacacgtgcgagtccgcacctgcgctctccccaccgcaagtgcgaaaacaccagaaaccagaaaactttagcaatttgcatatgtccaaattcaatccgttaagcattcgaaacacaccagagggccccgagacctcaatcaaacatagcaacaagtcctaaaacatcatacaaacttagtcgagccctcaaatcacatcaaacaatgctaaaaacacgaatcaccctccaattcaaacataatgatctttgaaacttcaaacttctacaaccgatgccgaaacctatcaaaccacgtctgattgacctcaaattttgcacagaagtcataattgacattacgtacatactccaactttcagaatcagaatccgaccccgatatcaaaaagtccacttccgatcaaaatctcccaaaattggactttcgccaattccatcctaaatcagctacagacctccaaaacacaatccggacacgccccaagtccaaaatcacccaacgaaactaatggaaccgacgaaactctattccggagtcgtcttcacacagtcccgactacggtcaaaatcctaaaacttaagattccatttagggactaagtgtccctaatcattccaaaaccacaaacagaacctccgggcaagtcacagaaggagaaaaagatacgggggaagtagtaaacaggggatcagggctattactctccaaatgatcggtcgggtcgttacacttggaaccccagccaatcatactatcaagtacaaatacattattcaaacttatccaaagcctcagaacatcacaacaaagaattgaggctcaaacgaaatagaatttctcttaagttattaaatttctattctttcaaaagagtgtctgaatcatacttaaacacttcgaattacttccatattttgcacataagttcaatttaactatatagacatgtctaaagtcttggaaaaccaattggagtccaataacatcaaagtcaactcttggtcaaacttatgaactcttaagttctacaaattgccaactttcaacaaatagtgtcgaatccttctaggaacatccaaaatcgaatccgaacatacgcacaagtccaaaatcatcatacgaacctataagaattaaaaaaactgaatttcgagtctatttactcaaaagtcaaaccttggtcaactcttccaacttacttccaaattaagagtcgttcttccaaatcaatctcgaatcactcaaaaattaaacccagccatacacgcaagtgattatacatcatatgaagaaactcaaagtctcaaaccactgaacggaataccaaagcctaaaatgaccgatcgagtcattacattctcctccacttaaacatacgttcgtcctcaaacatgccaagagacattccaaagccatcaaagcactgtgtaaactcactgtacacatacctgtgggtgatcccacatcaacccaatccatataagcctgaccatacaacctaaccgaagatcttaacttcaaccttagtctataaaccttataatcaaattccaaatctctgaaatccattacaagatctgattcttacatctatacattgtataaatttgaacaggccgaatcacgccataacctcaacccaaaaggtaatcacatgatataccacattgctaagatactcatagaaataaatccctaccaccacaattgttcaataacaaacccgataccggtaataaaacctcatatcaaataaaaccttattctgaaccttagcacactgccaatgatgacaggaacacacataaactcataaccaccaatcagatcaataagtcatggagctctctcgcccgacaaggactatagccaaattctaagctgattagtgacgttattctttcaaacctactataatcaaatccgatagcacctattataggtccaatggactaatctcgtcaaatataagttgctctactgacatgctacaccaatacaacccaagtccacaaactgtgcaattcgcgcacccataagcaacaactcaaatgtacccaaaagtggtaaaatgactcaaaaaagagaactgttccacaagctcaacagataccaccacaagcacaatgctatgaacccatcacacaagggagaaccaaaacactcaaaatcatcacaaagaatcatatcccaacataactccaccgcagagcatgacccaatccaaacaccggtcgacatgaataaccttgagccataatgctctaaatcaataaccatacgctaatcaatcaacaaacacacaaagtgcatgaccatagccatggagaaatggatagcaccatataccacaaataggaaagaccataaccaaggtgaaatcaaccattaaccaccccaagaaccatctcgctcgaattttgccacatggcccaaatagaacacatcatgtgtgtaaatggccgataatctcataacccattgcatcatcgaagagcaatacatggaatccaatagaaacggataagatcaactcttactcggtgctgagtaaacaaatccgaccttgtgtagaatacacatcctcattaggcctaccaatgggcccccaaattagtttcggttatccacaaatagataaataatcctccaggagtccacaataacctacataacacataccatttgttgtctaactctggccacatcttcatagtctgcaaccaaaggataatccataactgagacttcagtctccaaatcacaagaatacaaaagaatcaccatatctgatcccatctccaccactcgaatgactaactcatctctcataccttatcatcccacgagaaatacttccatacatatagcatgatttgaacatcagcagtcgatcaaccaggggagtatcgcaataccaatgaatcatctgtaagtcaaaacacagtgcgccttctgaaatgcatacccttctcaagtaataccaattagtactagaattcatctaaatatctaaaactatctatactatttaaaattcatgaccttcccttcaaaactaaaccgcaatcgtgtacatgtaaaccttgatcccacacgttacatcacatctaccatgccatcatatgaaaatcacgagaatctcattaacaactctgaatcacaagaaggatacataccccatcatccagaagccttccacttgatcccttccaagataaaatcataacatataatgcatcctcataccggtaaaaaaatacccatctcaagccatagtagaaatcatcaagaactcttcgaaaaccattagtacaagaccaagacattagaactgattcccctacctgaaccaagtcacgcaggtcgccagactcaagagtattgccacaaaacaccggcgtatccttaccacatcataagaacccaaagaacctatcacattcattaccgtcccgatccaacccactaccaagctatcctatttctctgagttccttctgaatttccttcaaactaacacttctccctgccagaacaccacgatccttacccaaagctcaccacaagagaccctaacatgaaaccacgtagtccatatgactatgatttgttttttattttttaaattgcacaagtgaagtggaagcctacacgcgtcaagtctattttaactacttttttttcttcttcttctttttcttttttgctacagaagaccggatattattgaaataagaaactaaggtggatcattacaaaccggaactgattgccgaatatcagtttctaaatcattaaacattgaatacctaagagtattttatggacatggttaaaagtttaaagaatggagatttgcttgtaatgagtcggaattattgatagttttataaagtaaggaattagcgttaatattttcagcttcttagagaacatatacctaattaaacagcatatgttttaaaaaaaggcgttttccaaaacagaggatatctaaatataaattgttttaacaagtttctaaaagacatttctgcataatcttcttagaaagttctctagcaactcttgatcagacggtttcttagaactttgcttattcgatcgggtattccttctctgcattatgcatattgtctttgaaaaaattacgctcatttaatttaatgagcattaattactacatacaaaacataaataacgaacatactaatgaaaataacatgattgaacagtaagttatttatgcagtaatgttgctgcatttggaaaaagaactgaaaactcttcctttcgaatagttatattaatatctctaggtcgcggatatgaccaaccaatttggctttggctatagaatttatgacctctatatttcttttccttagtcccattttccgatgatgtggtggatgaagtagaagatggctcaagtgagcgtgaattatgacgtatccctgttactctagtcggctcaggcatattgtttgagccaattaagtgaggaaaattaagccgagctctcgagccgcggattttaaaagcggcttgatcatacgccaatgctgcatcttcaggagtctgataagttcctagccacaatctcgcgcctcttctctccgggtcccttatctccgccgcaaattttccccacggccgccgtctcactcctatgtacctcctccaatattgcttcgtgttttcctcacgcgctgcctttccaccctcctcgggctcggattgagattcgagaattgttgtttcttcaatgttttcatccaaaaggcagctgccaaaacttgagctaggactattaggagttgcgacattgctcgaactcatcggcgaaaaactgttagaaaaatcggaatcattcagaagatggtgctcaatagagtcaagaaaatcaacgtcagagaaagagaaggttgcattatcagctggattcattttcttttcttttgccctaattaggttttggatgaatagtttcttgaacttgttcttactagggcttattgcgtacgactatttatacgcttgcccttcaaattgtagctctagactctgcattacctttattttctttttggaatttccgtgaaggtgcaattttaagcacgtgtatgttctgcttttttattttcattattctaataatgtttgatgataaattaaataatgtactgatcttcatcaattaaagaaatgatatatctctagaactgcagtcacgttcatttctgaaaattttagtcatttgagatcctttcttaacggaaatatatttaatctatatgaagaacacgcttagaatatgtgtacgtttgtatctagtaataacatgatctgtcaaatgcaagaaaagagtgtactatatttctattttaagaaataaaggtccgatacattctcagaaacgtgaagatagtacccatagagtggtggatacttctgtcttttttctgctcaattttagttgaagaaggtaaatattgctgaactacatttttactttggattcttctctttatatgtttttttggaaatgaaatatcaacaaattaaattaatgattttctttatgacaatgtggaaagaatcttacagatttttggtgcctggcatgtaggaagctctcgattgataagaagagggaggcaaaatgaaaaatattaaatgagaaataatatactccctctatttcaatttgttttgcattgtttgacttcacacgaaatttaaaaataaaaaaaaattatttcaaaaacttgtaattataaacatgtcatagtattatttgtagctataagagtaaaattttttgacttaaacatgacataatatttgtgtgattaactataaaaaattatcattaagataatatattatttttttaggaacgaactaataataaaataatgccaacaaaatgggacggagggacttatttgtgtttgacaagagtatttttattgatgaaatcttttttaatcgtttcacctaaatggatcatcactgatgagtggaaatttgccctctatacgtcttccaatcgttattttttagaagaaaaaaataatcatatcacttagctcaatcaacatctatacattcttctagatgtttagtattcaaaatatcattgaaacacgatccttataccatactactccttgtacgattatcaattgttacatgttttaattttataccaaactaaacactagcgcgaatgatcaatgcttttctaatataaaacattcatnnnnnnnnnnnnnnnnnnnnnnnnnnnnnnnnnnnnnnnnnnnnnnnnnnnnnnnnnnnnnnnnnnnnnnnnnnnnnnnnnnnnnnnnnnnnnnnnnnnnnnnnnnnnnnnnnnnnnnnnnnnnnnnnnnnnnnnnnnnnnnnnnnnnnnnnnnnnnnnnnnnnnnnnnnnnnnnnnnnnnnnnnnnnnnnnnnnnnnnnnnnnnnnnnnnnnnnnnnnnnnnnnnnnnnnnnnnnnnnnnnnnnnnnnnnnnnnnnnnnnnnnnnnnnnnnnnnnnnnnnnnnnnnnnnnnnnnnnnnnnnnnnnnnnnnnnnnnnnnnnnnnnnnnnnnnnnnnnnnnnnnnnnnnnnnnnnnnnnnnnnnnnnttttccccctagtgttaaggcttttatttttttttatttaaattggtctccaataattatttatgtgcaaaaagttacaatttgagtttggctttccaaacattatacatgatcattgagaagagacttctagtgttagttctaaccaaaattctaatatacaaggtgatttggggggggggggggggggggggggtgtgtgtatatatatatatatatatatatatatatatatatatatatatatatatatatatataaggcttgcttcttttgattttgaaagatggaaggttccaacagttcatgttaacaaggcctttaacttgattgagcagtccaacaaaagagttgaagacatggatcgtatcaagactgtgactcaagtttgccaatttatcagcaggtctattggcttctctgacgcagtggctgatatcaaattcatgctctccaattaggttctggatttcactaatgatgttggtgattttccaaggtaccttccgttcccttttaatgcacttggatatgagcaatgagtcagtttttcccatggctatttcaaagccattatcaacacactatttgaggccaaataatattgttgcagcttcatccatattgctagtactaggccccatgggaattgagtaggcaaaaatgataattccttggttattcttgataagtcctcctcctccacaaatgtgttggatgcaacttacatcactgttaagcttcatcttttgagcattaggtctgatccatctgaccattgtgctagtcttctgctctggtatagcttcacatgcttgacatatagtgtgtcgatcgtcccctacattagctcttccaaatctgcttttcagtacttgtaaaagagttgannnnnnnnnnnnnnnnnnnnnnnnnnnnnnnnnnnnnnnnnnnnnnnnnnnnnnnnnnnnnnnnnnnnnnnnnnnnnnnnnnnnnnnnnnnnnnnnnnnnnnnnnnnnnnnnnnnnnnnnnnnnnnnnnnnnnnnnnnnnnnnnnnnnnnnnnnnnnnnnnnnnnnnnnnnnnnnnnnnnnnnnnnnnnnnnnnnnnnnnnnnnnnnnnnnnnnnnnnnnnnnnnnnnnnnnnnnnnnnnnnnnnnnnnnnnnnnnnnnnnnnnnnnnnnnnnnnnnnnnnnnnnnnnnnnnnnnnnnnnnnnnnnnnnnnnnnnnnnnnnnnnnnnnnnnnnnnnnnnnnnnnnnnnnnnnnnnnnnnnnnnnnnnnnnnnnnnnnnnnnnnnnnnnnnnnnnnnnnnnnnnnnnnnnnnnnnnnnnnnnnnnnnnnnnnnnnnnnnnnnnnnnnnnnnnnnnnnnnnnnnnnnnnnnnnnnnnnnnnnnnnnnnnnnnnnnnnnnnnnnnnnnnnnnnnnnnnnnnnnnnnnnnnnnnnnnnnnnnnnnnnnnnnnnnnnnnnnnnnnnnnnnnnnnnnnnnnnnnnnnnnnnnnnnnnnnnnnnnnnnnnnnnnnnnnnnnnnnnnnnnnnnnnnnnnnnnnnnnnnnnnnnnnnnnnnnnnnnnnnnnnnnnnnnnnnnnnnnnnnnnnnnnnnnnnnnnnnnnnnnnnnnnnnnnnnnnnnnnnnnnnnnnnnnnnnnnnnnnnnnnnnnnnnnnnnnnnnnnnnnnnnnnnnnnnnnnnnnnnnnnnnnnnnnnnnnnnnnnnnngattatattagttttcgttttatgaaaagatggtctgatgttttcaaatattttggtgcatcttcactttcataactcccaacatatgataaatgaaagtctccttgtgatgagtatggaaatgggattgtgattcttaataatccaccaagtgaggagttggattttgagattcctgctactatagtccatccctagaggtctagcaaaatagctcaaaattttgttagcatgatcccctaaacagaatagatgatcaatgttctcaattctaggattctagttgttgttgttgcagtagtggaaaatggtgttaacttggatcccaaacctaaaacatgtttcctctgtagataatttatcatgtatggctctccaggtaagggaagagatcttaaaggggatatccttatgccagacaaaataaaattatccagattttttctctatctgaagatgtcccaagctgagacaacagaaaactttccaacagtagatggtatccaaatggctttgtctctcttgtttttgtccattttgatattaagagccttgatcttatcctgtgtttcatcatctagttgagtttggaacctattttaatttcataagccattactgatgatatcattgaccttaatctagttgtagctagtcatgtcgggaagcaactattgtaaaggccttgagtagcttcacatcatattttatgacttgtacgcatagtcaaaatttaatttcggaaagttcgaagttgattcggaaggaaaattctcaattcggaagctttaaattgaaagagttgactaaggtttgacttatgagtaaacgaccttggaatagggatttaaaggttccaataggtttatatgatgatttcgaacttgggtgtatgttcaagttgagtatcgggtggtccgagagcatttcagcgcttattatggaaagttagtattttgaaggttttgaaatttcctatgtttggtttaaagtggactttggtattatcgatgtccatttagggtttcgagtcttcgaataggttcgtattgtgatttattacttgtgcgtaaagtttggcatcattctggaatgtttaagtatgaatcgaacgtgttcgtctaagttggaatgtttcaaaactaaaagaaggattttgatcgtcgattcgtagtttggatgttgttttgtgttattagaggcctcgagcaggtttttgtcatgtcttgggactggttggtgtgattggaggaggttccgggaggcctcgggtgtgtttccgggtggttttggaccaagtttggatgggttgttgttgatggggtgctggtgtgcttcgcgatcacgaaggtagtcccgcgatcgcgaagaaggctggtgaagggcccctatgtttctcttcgcgaacgcgaggaggcttacgcgaacgtgaagaaagaccaagtcctacttcgtgaaggcataggctggatcgcgaacgtgaagaagtttgggaggggatgcctgtgaggcagaaagccttcgcgaacgtgaggtgtggaacgcgaacgcgaagggcagggtcagctgagcatcgcgatcatgaggcttttttcgagattgcaaagaagagcaggcttgggcagatttgatttaatatgggatttggctcattttctttcattttcacttggttgcacgacttttggagctcttgaataggagattttcatcatctatcatgaggtaagttcttcccacttgttgtaagctatatacacgagttgtacatagatattaacatgaaaatttgtagaaattgtgggattttgggagaaacctagaaattgatatttttggattttgaccacaaaatttgacgtgagattaggaataaatgatatattcaagttcgtggtattatgggtaatatttatcttcaaaattttttgaaatccgggcatgtgggcccaaagattgaatttgttgacttttcgagcggagttgggaacagttataaattgattaattttgggtgttggagtatatttttattagtttgcatgttgtttgactagtttcggactaatggacatcggtttgaggtgttaggtattaaaattgttatgtgctactagttgtggatgctacgtacgcacgaggtgacgagagtccgtacatagctaaaagcatgtttatgtccgggtagctaagactttatcatgtaatatttgaattatttgaactcatcttgctagcttaattaagtaaatttataattgaaattgattggaatatattaggccgagctttatcgccttgagttgtctggcgagatatttgataaacggtaaaagtcatatttactttatgccactatacctgtgttgtacgcacatgactcatagttcgataaatttcttcttttcctgtggatcgggccgaacgcctcgacaatataatgagacgcttctctagttcgcactggtcgaccctcgtcagtgtacatatcactttggatcgggccgtacaacattggcataatcgtgcgtgataccgctagcagtcggatatttaggagattccctttttattgaggcatgacatttatatggtattccttattcgttggagattgcatttgatatttctgatatgttggatagcacatgagatttgagagatttatatcgttaaaagaaatgttagaggattatgctagttaccattttatctcattatcattgttgtgcatcatatctgtttatgctttatcatactgatttattggaccactagtaagtctcgatgtcgacctctcatcactacttctccgggcgtcacgacccaaaatccgactagtcgtgatggcacctaacccaaccgactaggtaagccaattaaccactaaccaattccaataacaattaataaagcaattaagtaaagaaatatctaaatctaatacatttcccaagaactggtagtacaaattatgagcttctaagaatagaatttaaaaaactggtatgaaataatacatcatctgttcgaaatgtacatgaatagatttttataatctaaggcaaccatgaaaaagaggcaactacaaccaaaatgcaggtacatcttcagatccagctcccaacgaacacaacaacatcaacatccaacatttgtacgcaaggtgcataagtgtagtatgagtacaaccgaccccatgtactcaataagtaacaaacctaaccttaggttgaaagtagtgacgagcnnnnnnnnnnnnnnnnnnnnnnnnnnnnnnnnnnnnnnnnnnnnnnnnnnnnnnnnnnnnnnnnnnnnnnnnnnnnnnnnnnnnnnnnnnnnnnnnnnnnnnnnnnnnnnnnnnnnnnnnnnnnnnnnnnnnnnnnnnnnnnnnnnnnnnnnnnnnnnnnnnnnnnnnnnnnnnnnnnnnnnnnnnnnnnnnnnnnnnnnnnnnnnnnnnnnnnnnnnnnnnnnnnnnnnnnnnnnnnnnnnnnnnnnnnnnnnnnnnnnnnnnnnnnnnnnnnnnnnnnnnnnnnnnnnnnnnnnnnnnnnnnnnnnnnnnnnnnnnnnnnnnnnnnnnnnnnnnnnnnnnnnnnnnnnnnnnnnnnnnnnnnnnnnnnnnnnnnnnnnnnnnnnnnnnnnnnnnnnnnnnnnnnnnnnnnnnnnnnnnnnnnnnnnnnnnnnnnnnnnnnnnnnnnnnnnnnnnnnnnnnnnnnnnnnnnnnnnnnnnnnnnnnnnnnnnnnnnnnnnnnnnnnnnnnnnnnnnnnnnnnnnnnnnnnnnnnnnnnnnnnnnnnnnnnnnnnnnnnnnnnnnnnnnnnnnnnnnnnnnnnnnnnnnnnnnnnnnnnnnnnnnnnnnnnnnnnnnnnnnnnnnnnnnnnnnnnnnnnnnnnnnnnnnnnnnnnnnnnnnnnnnnnnnnnnnnnntaccaaggtcgggtccaaaaccaatagtccataacaacgtaaagcaaataatacaagaagtaactgagagataaaatgctcagcttaatcatgatttctgaaaatagttctgcctttcaggtacatcaataaaaacccaaatcgtttaccagagttgccaaaattatgaataggtttaaaaacaataatttttcccaaaatcctttcaataataaataagatgtttcttttacttttcagataaccagtgtaaaacaaatacatcactatgcccatcggccaacatgttacaacccaaattcgtgtaccttagatcatgccgtaagttagtcgacgtaaatccaagaagagattatctttgagatgataagaatttaatcctattggtcttaaacgatacaagggtgtataagnnnnnnnnnnnnnnnnnnnnnnnnnnnnnnnnnnnnnnnnnnnnnnnnnnnnnnnnnnnnnnnnnnnnnnnnnnnnnnnnnnnnnnnnnnnnnnnnnnnnnnnnnnnnnnnnnnnnnnnnnnnnnnnnnnngggtaatactagaggtgattaattgtcccaagaggtcatgttttaatgtattttaatcatataatatccgtatcataagtcttgaagtcaagcgagttatnnnnnnnnnnnnnnnnnnnnnnnnnnnnnnnnnnnnnnnnnnnnnnnnnnnnnnnnnnnnnnnnnnnnnnnnnnnnnnnnnnnnnnnnnnnnnnnnnnnnnnnnnnnnnnnnnnnnnnnnnnnnnnnnnnnnnnnnnnnnnnnnnnnnnnnnnnnnnnnnnnnnnnnnnnnnnnnnnnnnnnnnnnnnnnnnnnnnnnnnnnnnnnnnnnnnnnnnnnnnnnnnnnnnnnnnnnnnnnnnnnnnnnnnnnnnnnnnnnnnnnnnnnnnnnnnnnnnnnnnnnnnnnnnnnnnnnnnnnnnnnnnnnnnnnnnnnnnnnnnnnnnnnnnnnnnnnnnnnnnnnnnnnnnnnnnnnnnnnnnnnnnnnnnnnnnnnnnnnnnnnnnnnnnnnnnnnnnnnnnnnnnnnnnnnnnnnnnnnnnnnnnnnnnnnnnnnnnnnnnntgggacccacataggcggtttagacatatggatatatataagatacctcaaccccgttttaagttattatttttcagtatattcagaccttagaaccctaaaaacagtatctcaaggttctctcatgatccaagacccaaacaaagggcaaacaacacaaatcaagtgtcgggaatcccgtggcgctagtaagtttcttgttcttcttgttgttgctgatttttgtgttgttccagctcgtgtgggaggttgttttaagtgtttatgttctgtaaatacaccttcaagtttttaatatcaaccctaggtgatttcaagtcttctaaagtaattctagtgccgaaaaacccgaattgattgctagtttcgcttccttgttcttgtggcagaattggagggatatttcgtggaaaattaaggtcaaattggagttgttctttctgtttaaaggtaaggaacctcttactctatatgtatttaagattatccaagttgcggctaagtcgttgaagctagaacttgtgaaatatatatcgaaaggcttggtagtaatgttgttggttggtggactattttggaggctcaatatgattattaatgatgttgtttgggctgtttggtgattgtattgacttgtgggaagtcatataaataggggaggtgctgtccgtttcatcgtaaaataggttgcggtcgatacataatagttacgacgcttaaacgataatgatagtgtcatttctcttattgtagactaaggagtcgtgacatttgcatagcttgaggttgggcagtatatacaaggtatgtgaggctatccccttcattcttttgcacgactccgattgtacataatgtaatgaacgagctccaaagatactctactcttagaagctagcagtacttacattgctgcccttcttatgaaacgattgatattgatgttacttctcttattcttatattatcaatgttgttggtagttcctgattcttataagattcttgatgaagagttaatattaatcctaataagtaaggatactgaccttacgtcactccgaaaggttcaacatgtgattccaatgagtccaacatgcatcatatatatgtatctattttactctaatgagccgcgttatagtcggccgggtatggcacctattgtgcaaccactgatcagttgggttttaccgagctccacgtggccgggtacgattctaccgagccttatgatggccgggtacgttttaccgagcctattatggccgggtacgatatgatgatgatgatgcccacaaaggcgtatgttttaaaagtttatgtatatatatgtatgtatcatgtatttcatgtcagtagccctcagaggtacccagatgtcacaggttgtatattctctatccctgtttacattactgttcttacttatgctttcctgccttacatactcagtactttattcgtactgacgtcctttttatttgtggacgctgcatgtcgtgctgcaggtcctgatagacgggtagacgcagctcccccaccacagtaggctatccagttcagcggttattggcgagatcccttctccggacttgccgtggtcttggtatgcatttttgttatagacattatgggtatgtcggggccctgttccggcaatgttgtagcacttatgttcctttagaggctcatagacaggtgtcgactcatgtatggtttggaatgccttgtcggctgatttttgttgtatagtctttcatggcagcatggtagctcgtaccttatatatagtttcttgacagtcttgtcgtcccatgttatgtatgttcatgacattatctttcattgttggatgttcatgatccatgtctaccatttatattgatcttgtcggcccttaaagataataaggaaggttagataaaatgtacgttggtgctcggcaagtatggcccgggtgctagtcatgaccctccagttgggtcgtgacaaacttggtatcagagcaagtctgtcctaggggttgtctatgagccgtgtctagtagagttttgattatggatgtgtagcgcgccacatttataatcaggaggctacatgacatctagggttgttaccttcttcctgaatctagatcgtgcgtagagttgagtcgtaagtgttcatatctaatattcaccttgttttctttcagcgatgccttcgactaggaagcaagcgattagtaaacggcttgatacagctgtgggagagggtaacattcaggtgcctccagccagagcaggccaaagtgaggctcagagtgagatgccgtctcatacctctccgtctcctccagaggatattaggaggcacccagtacatccagttcctccgtctggcactacagaccacgatatgcgcagtgcggtgcagttgttgactagcttggtagctgctcaggctcagaggcagaataccggtgctgctgataaaccggttagtgcgagagttcgtgattttattaatctagaccctccagtgtttaccggatcagaccccaaggaggacccacaaacatttattgatcaggttcatcgtacattgcgggttatgcatgctagtgatacggaggcagtagagttggcttcttatcggttacgggatttagcggttttctggtatgatagttgggagagatctaggggtccgaacgctcctccagccgtgtggaaggaattttctgaggcctttcttcgtcactacttgccagttgagatacgacgagctagagctgataagttcttgaaccttcgacagggtaatatgagtgtacgagagtatagtatacagtttgattctttagcaaggtatgctccccatatggtggccgagatgagtgatagggtgcatctgttcgtgaacgggttgggaccacatctgataaatgagtgcacaacagcctccttggtagagggcatggatatttcccgtattcaggcttatgcccagaccctagaggatcgtaagcgccagcaaagggcagatagggagcaggataggggccagcataagagggcgagatttgcagggtattctgatgagttcagaggcagtatcaggccccaatcttcgaggagttcggcgccacctgtagctagtgctcctccacagtttcagaggcctcggtatgatcgatttacctattctggttcaggtcagagttcgagggcatcaggctcacaatttcatagagatactagtcagacgagacccccaacacctcgttgtgatcagtgcggcaaggcccactttggactgtgccgtcgaggttccgatgcgtgctattcttgcggacagcctggccatatgatgcgggattgtcctaacagaggaggtggtggtatggctcaccgactggatctgtgtctggttcttcctcatcagttcgacctccagcacaaggttttcaacagtcgacaggtcgtggtagaggtagaggtcagtgccgagttcgagtggtgctcaaaatcgaacctatgctctagtaggtcgacaagatctcgagtcatctccggatgttgttacaggtatattgtctgtgttttcttatgatgtatatgcgctaattgatccaggatctacattatcatatgttacaccctttgtggctaataagtttggcattgaacctgaattgataagtaaaccacttgcggtatccactccgataggagattctgtgattgctagaagggtatatagaggttgcactgtgatgatttgtagtcgtcaaacctcggcaaatttatttgagttagaaatggttgatttcgatgtgataatgggaatggactggttggcctcatgctatgcaaatgttgactgtcgtacgaagatggttaggtttcagtttcctggtgaacccgccattgaatggaaggggaacattgctacgccgaaaggtaggtttatttcctatcttaaggcaaggaagatgatctcaaaaggttacatttatcatcttgttcgcgttagggatgcggaggcgaagccgcctactctacaatcaatccccgtggtcaatgaatttccagatgttttcccagatgaactcccaggccttcctcctgaaagggagattgagtttagcattgatgtgttgcctgacactcaaccgatctctatccctccatacaggatggccccggcagagttgcgagagttgaaggcgcagttgaaggacttgctggataagggtttcattaggcctagcacttcaccttggggtgcgccagtcttgttcgtgcggaagaaagatgggtcgttaaggatgtgtatcgattatcgacagttgaataagtttactataaagaacaagtatccacttccaaggattgatgacctgtttgaccaactccagggtgccaagtatttctccaagattgacttacgttcagggtatcatcaggtgagggttaaggagaaggatattccaaagacggccttccggacaagatatgggcactttgagttcttggtgatgtcgttcgggctaacaaatgccccagcagcttttatggatctcatgaatagtgtattcaggccctatcttgatgtgttcgtgatcgtattcattgatgacattctggtgtattctcgttcggaggcggaacatgcgggccacttgcggatagtattacagacccttcaggatcgtaagttatatgctaagctctccaaatgtgaattctggctgaactcagtagcattccttggccatgtgatatctgacgagggtattagtgtcgacactcagaagatcgatgcagtgaagaattggccgagacctacaacaccgtcagaagtccgcagcttcctggggctagcaggatattataggcggtttgtagaagggttttcctctatatcagcaccattgactaagttaacacagaaagctaccaagttccagtggtctgacgcttgtgaacatagttttcaggagctaaagaatcgattgacatccgcgccagtgctcactctcccagaaggaacagaaggttatgtggtatattgtgatgcctcaggtataggtttggggtgcgtattgatgcaacgtgggaaggtgattgcttatgcatcaagacaattgaagaagcatgaaaagaattacccgactcatgatttggaattggctgcagtaatatatgctttgaagatatggcggcactacttatacggcgtccatgttgacatctacacagatcacaagagtttacaatacatcttcaagcagaaggagttgaatttgaggcagcgtaggtggcttgaattactgaaagactacgacgtcgagatattgtaccatcccggtaaagccaatgttgtggcagacgctctcagccgtaagtcaatgggaagcttagtacatattgaggcaggtagacaagggttgacaaagagcttcaccagctggccaatatgagaatcagattgttagactctgatgacggaggtgttactgtacagaatacagcagaatcatctttggtagccgaggtaaaagcacggcaatatgaagatcctaccttagtaagattgagagagggaattcagcagtgtaagattacagctttcaagatcggaggagatgggacactgagataccagggccgattatgtgtgcctagtgtggcagggttgcgagagaagattatgattgagattcatcagtcccgatattctatccatccggctcgacaaagatgtatcatgacgttaaggagcagtattggtgggataacatgaagaagtctattgcagaatttgtagcccagtgtcctaattgtcaacaagtaaagatcgagcatcagaaacccagtggattgattcagaatatagagattccgacctggaaatgggaggtgattaatatggacttcattattggattacctcgctcttatcataagtttgactccatctgggtgatagttgatcgacttacaaaatctgcccattttctgccagttaagacaacttacacggctgaagattatgcgaagttgtatatcaaggagattgttaggcttcatggtgtgccggtatctattatatcagaccgaggagctcaatttacggctaacttttggaggtcttttcagaagggtttaggcacacaagtaaatctcagcactgcattccatccgcagactgacggacaggctgaacgtaccattcagacgcttgaagatatgctacgagcatgtgttctagatttcaaggggaattgggatgaccatctggcacttatagaatttgcctacaataatagctaccattccagtattaaaatggccccgtatgaggcactgtacgggaggagatgtagatcaccagttggatggttcgaagtcggtgagacagaattatatgggccagatttgattcaccaagccattgagaaggtgaaagtgatacaagagcgactgaggacggcacaaagcaggcaaaagtcttattccgatgtccgacgtcgtgatctggaatttgaggttggtgattgggttttcctgaagatctcgccgatgaagggtgttatgcgttttgggaagaagggtaagttgagtccgcggtatattgggccgtacaaaattcttcgacgaattggacaggttgcttatgagttagaattgccatccgaattggaatttgtccacccggtattccatgtatctatgttgaggaaatgtattggagacccttctcgggtcgtccctatcaaagatgtacaagttacagaggatctatcatatgatgaagtgccagtggctatattagatcgacaagtccgcaagctgagaacaaaggatgtagcttccgtcaaagtattatggaggaacaagaatatagaagaaatgacatgggaagcagaagaggagatgaagtctaaatacccttacctattccagagtgaagataacgaggatgccgggggaaagaaggacgcattataaggtgaaacggctctatgaggtaagcaatagcttgtgaatactctttttttaatacaaaatggtgatatgcagataatgtacatatccataatgctttgtatagtcttgtaaggccataggttgggtttaactgcttgcaagtttggctagtgtccattttataggggaaactcagccggaaatctccgtcggaatccacgatgagttagacaccccataaacccttacattcgaggacgaatgttcctaagggggagagggtgttacaacccaaattcgcataccatagatcacgccgtaagttagtcgacgtaaatccaagaagagattatctttgagatgataagaagttaatcctattggtcttaaacgatacaagggtgtataagagtggttaacaagtattagaagttaaacgaatcaaggatgttgtaacccgtattttcgggtaacactagaggtgattaactgtcccaagaggtcttgttttaatgtatttgaatcatataatatccgtatcataagtcttgaagtcaagcgagttatgaaacaaaagtcgataaaagttgtcgcaacttaggtttataattttacttaaactttaggtcaaatgttactgcattttctcccaatgtgcttggaattatggggtgatctacctatcaaattgaagatctatgagtctagtttccaacgcattaaaccgttcgtcgatacgatctcggaatagagagatattcgcgttttcgcgagagtgcgccaagctgctctctatggggcccacaaaggcggtttaagacatatggacatatataagatacctcaaccccgttttaagtcattatttttcagtatattcagaccttataaccctaaaaacagtctctcaaggttctctcatgatccaagacccaaacaaagggcaaacaacacaaatcaagtgtcgggaatcccgtggcgctagtaagtttcttgttcttcttgttgttgctgatttttgtgttgttccagctcgtgtgggaggttgttttaagtgtttatgttctgtaaatacaccttcaagtttttaatatcaaccctaggtgatttcaagtcttctaaagtaattctagtgccgaaaaacccgaattgattgctagtttcgcttccttgttcttgtggcagaattggagggatatttcgtggaaaattaaggtcaaattggagttgttctttctgtttaaaggtaaggaacctcttactctatatgtatttaagattatccaagttgcggctaagtcgttgaagctagaacttgtgaaatatatatcgaaaggcttggtagtaatgttgttggttggtggactattttggaggctcaatatgattattaatgatgttgtttgggctgtttggtgattgtattgacttgtgggaagtcatataaataggggaggtgctgtccgtttcatcgtaaaataggttgcggtcgatacataatagttacgacgcttaaacgataatgatagtgtcatttctcttattgtagactaaggagtcgtgacatttgcatagcttgaggttgggcagtatatacaaggtatgtgaggctatccccttcattcttttgcacgactccgattgtacataatgtaatgaacgagctccaaagatactctactcttagaagctagcagtacttacattgctgcccttcttatgaaacgattgatattgatgttacttctcttattcttatattatcaatgttgttggtagttcctgattcttataagattcttgatgaagagttaatcctaataacgtgtacgaaggataccgaccttacgtcactccgaaaggttcaaaatgtgattccaatgagtccagcatgcatcatatatatgtatctattttactctaccgagccgcgctatagtcggccgggtacggcacctattgtgcaaccactgatcagttgggttttaccgagctccacgtggccgggtacgattctaccgagccttatgatggccgggtacgttttaccgagcctattacggccgggtacgatatgatgatgatgatgcccacaaaggcgtatgttttaaaagtttatgtatatatatgtatgtatcatgtatttcatgtcagtagccctcagaggtacccagatgtcacaggttgtatattctctatccctgtttacattactgttcttacttatgctttcctgccttacatactcagtactttattcgtactgacgtcctttttatttgtggacgctgcatgtcgtgctgcaggtcctgatagacgggtagacacagctcccccaccacagtaggctatccagttcagcggttattggcgagatcccttctccggacttgccgcggtcttggtatgcatttttggtatagacattatgggtatgtcggggccttgttccggcaatgttgtagcacttatgttcctttagaggctcatagataggtgtcaactcatgtatggtttggaatgccttgtcggctgatttttgttgtatagtctttcacggcagcatggtagctcgtaccttatatatagtttcttgacagtcttgtcgtcccatgttatggatgttcatgacattatctttcattgttggatattcatgatccatgtctaccatttatattgatcttgtcgacccttaaagataataaggaaggttagataaaatgtacgttggtgctcggcaagtatggcccgggtgctagtcatgaccctccagttgggtcgtgacacaacatgtgtgagaaatcatgaatgatgtgataccgtacagcatgaggaagatacatctctatgcctatatgtcatgtgtgcatgtcagtgcaatgtatctcagagatgaatcgtctactcacactctcagagtactcaactcactgtctcacacttttcactcatcatgctcaaccactcggtactgtatacggaccaggaaagatctatcccggaatatatacatcactgaccatcagtcactcagtaccgaggaaggtcaatccggccctagggagaagatccatctccaggtatataaatgcttcggacaagatccatgtccagtgaagatccatccctcaatataatcaaccacgctcactaggggtgtacagactctggaggggctcattcagcccaagcgctataaaccgcacggacaactcacatgttatagtatcaatatctggatccgcacggacaattcacgtgctacacagacaactcaagtggcatagtatcaatatcctcacaatcaggccctcgacctcactcagtcatcaatctctctagtctctctctcgcgggctcacaatgtcataaaactagcccgaaaatgatgatatgatgtatcaataaatagcaacagaaactgagatatgatatgcatatgaatgcgtatgactgagtatgtaatgcaatgaaagcagataattcaacatcaaaaatgacctcagtgggtcccaacagaataagcatgtagcgtaaacatggcttctaacatgaatcatagctcgataactctagtacgtaaagatttattgattacagacaagttcaggtaactacacagtactacagaaataacggaatcacagttcacacgatacacgcccacatgcccgtcacctagcatgtgcgtcacatcaataccaaacacataacacgtatattcagggttcataccctcagctccaagattagaagagttacttacctcgaacaagacgaatccaaagtcgagcaagctaaacaatgctccagnnnnnnnnnnnnnnnnnnnnnnnnnnnnnnnnnnnnnnnnnnnnnnnnnnnnnnnnnnnnnnnnnnnnnnnnnnnnnnnnnnnnnnnnnnnnnnnnnnnnnnnnnnnnnnnnnnnnnnnnnnnnnnnnnnnnnnnnnnnnnnnnnnnnnnnnnnnnnnnnnnnnnnnnnnnnnnnnnnnnnnnnnnnnnnnnnnnnnnnnnnnnnnnnnnnnnnnnnnnnnnnnnnnnnnnnnnnnnnnnnnnnnnnnnnnnnnnnnnnnnnnnnnnnnnnnnnnnnnnnnnnnnnnnnnnnnnnnnnnnnnnnnnnnnnnnnnnnnnnnnnnnnnnnnnnnnnnnnnnnnnnnnnnnnnnnnnnnnnnnnnnnnnnnnnnnnnnnnnnnnnnnnnnnnnnnnnnnnnnnnnnnnnnnnnnnnnnnnnnnnnnnnnnnnnnnnnnnnnnnnnnnnnnnnnnnnnnnnnnnnnnnnnnnnnnnnnnnnnnnnnnnnnnnnnnnnnnnnnnnnnnnnnnnnnnnnnnnnnnnnnnnnnnnnnnnnnnnnnnnnnnnnnnnnnnnnnnnnnnnnnnnnnnnnnnnnnnnnnnnnnnnnnnnnnnnnnnnnnnnnnnnnnnnnnnnnnnnnnnnnnnnnnnnnnnnnnnnnnnnnnnnnnnnnnnnnnnnnnnnnnnnnnnnnnnnnnnnnnnnnnnnnnnnnnnnnnnnnnnnnnnnnnnnnnnnnnnnnnnnnnnnnnnnnnnnnnnnnnnnnnnnnnnnnnnnnnnnnnnnnnnnnnnnnnnnnnnnnnnnnnnnnnnnnnnnnnnnnnnnnnnnnnnnnnnnnnnnnnnnnnnnnnnnnnnnnnnnnnnnnnnnnnnnnnnnnnnnnnnnnnnnnnnnnnnnnnnnnnnnnnnnnnnnnnnnnnnnnnnnnnnnnnnnnnnnnnnnnnnnnnnnnnnnnnnnnnnnnnnnnnnnnnnnnnnnnnnnnnnnnnnnnnnnnnnnnnnnnnnnnnnnnnnnnnnnnnnnnnnnnnnnnnnnnnnnnnnnnnnnnnnnnnnnnnnnnnnnnnnnnnnnnnnnnnnnnnnnnnnnnnnnnnnnnnnnnnnnnnnnnnnnnnnnnnnnnnnnnnnnnnnnnnnnnnnnnnnnnnnnnnnnnnnnnnnnnnnnnnnnnnnactaatattttcccaaaaattgcttgtggggtccacgtctcaaaatccgatgaaacttataaaatccgacaacccatccaattacaagttcaaccatactaattttactcaattttgactccaaatcgatattcaaaactcaaaaatttatttttatgaaatataggaatttccttcgatttctcttgaagattcaataatcttacaccaaaaatgaagattaattcatgaaatataatcacaagggagtcaagaacacttacctcaagttgtgtggaaacattcctctccaaaatcgcccaagtcgagctccaaaataagaaaatggtgaaaaatagcgaaacccgaacttaaagggttctgtcgagcaccttcgcttctgcgaaatttggactgcatctgcgcctatcgcaggtgcaagaagcccatcgcacttgcggctcaaccttgattttgcgcccttcagcccgcttctgcgactatcgcaggtgcgggattgtcttcgcacctgcgacctctgcccagtccttccttggtcccttctgcaattcattccgcaattctgcgtgcgcgcacctgcggtgccctctctgcaggtgcggtcataccagtagcaacaacacatcagttgcttcatcaactcaaaatcaagtccgttaaccacccgaaatcaacccgaggccccgggacctcaaccaaatataccaacaagtcccttaacataatacggacctactcgaggcctcaaatcacacctaacaacatcgaaacgacggatcgcacctcaaatcaaaaacctatgaactttgaactttcaaattctatatcttgtgccgaaacacatcaaatcaatccagaatgacttcaaattttgcacacatttcacattacggacttattccaaatttccagaatttgattccgaccccaatatcaaaaagtcaacccctcgatcaaactttccaaaaatttaactttcgccatttcaagcctaattccactatggacctccaaatccgaggtcgtttatcatacggagctattggaattatcagaattcaaatccgaggtcgtttacacataaagtcaatatctggtcgactttttcaacttaagttttccattatgagtctaagtgtctcaattcatttcgaaatcttttcagacccgaactaactaatctgataggtcataatacagctataaagcacaaatagagcagtaaatgggaaaatatggctgtaatactcaaaataacctgccgggtcgttacatcggggttaggctagatacctactgggtatgcgttaatttaagtactcatgctatatttctgcactaaatgtgtaggatctgacaggttcatttggtggtcatctttacgcgtaggcacagatgctgaggaggctttatggtgagccgcatttcaggctacgtatcgtagtctatggagtctccatcgtattatttactttatcttgtctcatttaaattccagataaaagttgtattattattttactccttagtaaatgctcatgcatttgtgatacgaattgtgggatattctagttgatgtttacgaattagcatattattatcacctcttattcttatgtcatactaattatgtatgtacctgtgattttaaatgcttaaatttctttacataataaaatttatgatttcaaaagtaataaaataaaaaattaattagatggttcacagttggcttgcctaacggcgacgttgggcgccatcacggtctagagtggatttcgggttgtgacaacaagtggctgctaggaatttgaggttatctcctccttcgttgtaggggaagcatagttattccaagtagtctagtgatatttaccacttgtgtcttgtcctgtccagaagcatattaatatacttctcaataagctccaaagtgcttttagggggggggggggggggggggggggggggggggaaaaaagggggggggggggnnnnnnnnnnnnnnnnnnnnnnnnnnnnnnnnnnnnnnnnnnnnnnnnnnnnnnnnnnnnnnnnnnnnnnnnnnnnnnnnnnnnnnnnnnnnnnnnnnnnnnnnnnnnnnnnnnnnnnnnnnnnnnnnnnnnnnnnnnnnnnnnnnnnnnnnnnnnnnnnnnnnnnnnnnnnnnnnnnnnnnnnnnnnnnnnnnnnnnnnnnnnnnnnnnnnnnnnnnnnnnnnnnnnnnnnnnnnnnnnnnnnnnnnnnnnnnnnnnnnnnnnnnnnnnnnnnnnnnnnnnnnnnnnnnnnnnnnnnnnnnnnnnnnnnnnnnnnnnnnnnnnnnnnnnnnnnnnnnnnnnnnnnnnnnnnnnnnnnnnnnnnnnnnnnnnnnnnnnnnnnnnnnnnnnnnnnnnnnnnnnnnnnnnnnnnnnnnnnnnnnnnnnnnnnnnnnnnnnnnnnnnnnnnnnnnnnnnnnnnnnnnnnnnnnnnnnnnnnnnnnnnnnnnnnnnnnnnnnnnnnnnnnnnnnnnnnnnnnnnnnnnnnnnnnnnnnnnnnnnnnnnnnnnnnnnnnnnnnnnnnnnnnnnnnnnnnnnnnnnnnnnnnnnnnnnnnnnnnnnnnnnnnnnnnnnnnnnnnnnnnnnnnnnnnnnnnnnnnnnnnnnnnnnnnnnnnnnnnnnnnnnnnnnnnnnnnnnnnnnnnnnnnnnnnnnnnnnnnnnnnnnnnnnnnnnnnnnnnnnnnnnnnnnnnnnnnnnnnnnnnnnnnnnnnnnnnnnnnnnnnnnnnnnnnnnnnnnnnnnnnnnnnnnnnnnnnnnnnnnnnnnnnnnnnnnnnnnnnnnnnnnnnnnnnnnnnnnnnnnnnnnnnnnnnnnnnnnnnnnnnnnnnnnnnnnnnnnnnnnnnnnnnnnnnnnnnnnnnnnnnnnnnnnnnnnnnnnnnnnnnnnnnnnnnnnnnnnnnnnnnnnnnnnnntatctctttatttgtggagagggattttgtttgccaacccatgattttgctaatgatattgttgacaatgtcatagtagtatgatatcttcctcattcctgtggtgcgagggcatcccagatacttgatagggaaatggtgattgttcattccaatgatggtcatgagtctgttgattatggatgctttagtgttattagccactacaaagcaacttttatctttgctgatgagttgtccatacactttctcataattattcaaggttttcactaccatctccagagattttttgcttccattacagaacatgatggtattatctgcaaaagaaatgtgattaatcttaggaccattgatatttatatagaaacccatgtatccttctctatcatgaagattgtttaatattctggacagtatctcagcactgataataaacaaaaatggagatattagttctccttgtctcaaacctctttcagatttaaaaaaatccatgtcttcccacattgaaaataatggagtaccaattattggatatgaagttatagatgagattaatccaccattctgagacgccaagtttccgtagagccagacatataaaggtcgaagaaactttatcatatactttagccatatcaagcttaataataatatttttacctctataggtcttcctaatgtcattgataatctcctggtctaggagaatattatcagttatagctcttcctttgataaatccatattgattcctatagataatcttagggagaattttaaaaataatcttaccgaacacattgcacaggcttataggcctaagatctatgaatttttgtaggtgttaaaccttggggatcattactaataaagtgtgagtgaagaacttggggagttctgcaccattaaagaaagatttcacagctttaagaagatcatagcatatgatgtcccatgaagtttgataaaaatagtcatttgagccattagggcctggtgcactatccttgtcaatagaaaacaaatactatctttcacatcttgtgtaataggtgtggctatgagcatgttgttatgttcctcaattatacttctctcaatacaatccaaagctttaaaattggtggcttgagtatcctgggagaatattttccggatgtgtcgaattgcagtttctgttgtgctatcatttctttctattcattggttctgctcattcatgatcttagtaatagtcattctcctccttatttcctttataattgtatgtaaatatgatgtattagcatcacttcttcaaaccatttggctctggatttttgtcttaagatagtttcttgaatatttaggtaccttgtgaattcagctctgcttctagataattctcttctattttcaagagaattgtcattcacacaattatctttaagagttgtcatctcagctttcaaccttttggtttcttcatagatgtcaccaatagtctgtcttaacctgttgctcagctctttataaagttttttaatcttttaatgtagtgtgtagaggggatttccatagacctcttcttcccaacattcctgaactgttttcagatattcaggatgttcagtccaaaagattagaaatttgaaataccttatgaaagagcttatctcagagctcattttaactagtaaaggttcatggtctaaacaagctctagacaaatgagttactgagatgttattgatagagtcaaaccaagtagtgttgtaaataattctatcaagtatattccatatgttgttggttggtctctgttatcacactatgtgtacataaaacctataaagtctgcatcctgaagcccatactcattaaggcactcaatgaaatctaggctctcttccagtctacgccttcgtccacctttcgttttttattggaagtgataacattaaagtcttcaatttccctcaggggccttgtatgttgttagtcatatctttaagatcctgtcatagctctcttctctgttgtttagtgcatttagcgtacaccactgtaatatagatatgagagctattgttgtaagaaacattgatcagtacatattgcactttgtcttgaatggtggtaatatccacttcttttgtctagaggatccaggtcttatttgagcagttatagaagccctgctgcataccaagtcttcttctgaatttgtccattttcctattgtccatcataggttcctataaacatattaaaggatttgaaattattgtttgatggttttgactatctctagagattctttagaagcaaccccccttatgtttcatgaaattgtattaatcattgggtacattagaggtaggttccatttgctcttccttgttctcttctgcatttttatgtatctggacaaaaccaccaccagggttctaacattttctaggagttaaattgttgaagagggtgatattcggttgtactcatttacctctatggttgagattatcatggtattcagagttgatgttacctctgggttcatcatctgaattagatagtcggctctcctttctatagcctatgtctatttctgttttcatgttgtctatatcttgaaaaacttctttaaactcctcccttggcttttctcctttttcacactgataaggtggttcaagatccttgttgagggtaaaatcttagtcactattcctactagatgagcttggatatctatcttccctcccatcttcctcaatgataagggacctttcttgagtaacttatttaaggttgagtgttggccagttgatagtgtgatcaatctccttctttatgatgttaccattgatctttcttgcctttccttgacgtgtaacctcctcaggaatggctacctgtttagaatattttttcttcttgttaagtgagagattgatatcttttgggtcaacgatatccaagttgagcatttccccttgtagttcagtgtcactcatgttggtgcgggtggaattttcagctaacatttagccttgtttgttgttttttgtttcatcttttttctttctccttttgggatttgtcccatcttgtgcttcttgactgatgctgaatggattcagtagtatactgatctttgtcattatcattaatgcatgatctagtgtccatttcctcttttccagcttcttcttgaagtatgctgaatgaattgttagtttctcttatttgctggtttcctttggtgtgtgtattttccttgaaggtaggctctataaactgtggtatagtatctttctcattattgttgtcctgattttgccctttttgtgcctgtcacgacccaaaatccaactagtcgtgatggcacctagcccaacccgctaggtaagccagttaaccactaaccaatttcaataataattaataaagcaattaagtaaagaaattatctaaatcttatacgttccccaagaactagtagtacaaatcatgagcttctaaaaatagagtttacaaagctgaaatgaaataaatacatcgtctgtttgaaaaagtacataaacagaatttttatagatctaaggctaccacgaacaagaggcagctacaaccggaatacggcaacatcagcaaccaacatctgcacgtaaggtgcagaagtgtagtatgagtacaaccgaccacatgtactcaataagtaacaaacctaaccttaggttgaaagtagtgacgagctaacaaaggtcgggtccaacaccaatattccacaacatttcataatagtatagtacatgtaacaaaagagtatctcagaaataaatggctcagttcgttcacagttccagaaaaaataggcatttcttttcaagtatctcagtgaaaacccaaatcttttaccgaaaaatccaaaatacgagtaagtttgaaaactgtaatttttcctaaaagtcctttcaacaaatagtaagatgtttcattttcagatagcatgaggaaagtaattatctatacctacatgtcaagatacaggtaaaatcataaatgtccccaaaactgggtagcaaaaggaaatgcacctctatgcatgtatcacaattacgcatgtcaaatacaacgcatctcgatgatgagctcatgtacccacactctcagagtactcaatctcactgtctcgcattctctctcactatgctcagcacactcaatcactcagctctatacannnnnnnnnnnnnnnnnnnnnnnnnnnnnnnnnnnnnnnnnnnnnnnnnnnnnnnnnnnnnnnnnnnnnnnnnnncgctgcggcgtacaacccgatccatatttatagtcgactgtgctcactggggatgtgcaaactttggaggggctcctttcagcccaagcgctatatcgctacagcgtgcagcccgatcccatagaatgcaatcaatatatcgctgcggcatgcaccccgatcccataaaatataatcaatatattattgtgatgtgcagcccgatcccaagatatcactctcactcgggtcctcggcctcactcagtcatcaatctctccagtctcactcgcgggctcacaatgtcatgaaactagcccgacaacaatgatatgatgtatcaataaataataactgagactgagatatggtatgaatgcatggnnnnnnnnnnnnnnnnnnnnnnnnnnnnnnnnnnnnnnnnnnnnnnnnnnnnnnnnnnnnnnnnnnnnnnnnnnnnnnnnnnnnnnnnnnnnnnnnnnnnnnnnnnnnnnnnnnnnnnnnnnnnnnnnnnnnnnnnnnnnnnnnnnnnnnnnnnnnnnnnnnnnnnnnnnnnnnnnnnnnnnnnnnnnnnnnnnnnnnnnnnnnnnnnnnnnnnnnnnnnnnnnnnnnnnnnnnnnnnnnnnnnnnnnnnnnnnnnnnnnnnnnnnnnnnnnnnnnnnnnnnnnnnnnnnnnnnnnnnnnnnnnnnnnnnnnnnnnnnnnnnnnnnnnnnnnnnnnnnnnnnnnnnnnnnnnnnnnnnnnnnnnnnnnnnnnnnnnnnnnnnnnnnnnnnnnnnnnnnnnnnnnnnnnnnnnnnnnnnnnnnnnnnnnnnnnnnnnnnnnnnnnnnnnnnnnnnnnnnnnnnnnnnnnnnnnnnnnnnnnnnnnnnnnnnnnnnnnnnnnnnnnnnnnnnnnnnnnnnnnnnnnnnnnnnnnnnnnnnnnnnnnnnnnnnnnnnnnnnnnnnnnnnnnnnnnnnnnnnnnnnnnnnnnnnnnnnnnnnnnnnnnnnnnnnnnnnnnnnnnnnnnnnnnnnnnnnnnnnnnnncctaagtatgaaatatcaatgaattcagtgagatgacagtaagaaacaaccactacgggtccaaacagtattggcataatgcctaaacatgatatttagcaagattgacaacttaaatactttatcacatggtgaaaacatggatatcaacaaaataggaccactatatagtgtcatgggaacaacagaatctcaattcacatggtgcacacccacacgcccgtcacccagcatgtgcgtcaccataacactaatcacataacacgtatttcggggttttataccctcaactccaagattaggaattacttacctcaaacaagccaagtgatattccaaaattccatcacgtgcgtttcgacctccgaacggctcaaaactaaccaaaaacaactcatgtacattaaacaatgctaaaggaaccaatcccgatcgaaaaagatcaaatcttgaatcaaaaacccaaaatcggccaaaagcccaacccggtcccgcacctcagaacccaacaaaatttacaaaatccaacaacccattcaattatgagtctaaccatactagtttcactcaaatccgacaccaattcgatgttcaaaactcaaaatttcatattatgaaggtttatgccaaaaccccccaattttctctttaaaattcacaatccaattacccaaaatgaaggtatattcgtgatataaaataaacaatgagtagagaacactttccccagtccacaagatgaaaattgcttcaagagttgcctcaatccgagctccatagctccaaaaatgtaaaaatgaacgaaaaccctcgataatatagcttctgcccagtgattccgcatttgcggaaaattcctcacatctgtgaccaccgcttttacggtaaaacttcgcttctgcgaaaacaactggcccagaaatccctcgcacctgcagcctttaagccgcttttgcgatcgcgcttctgcacacatgaaccgcatatgcagttgcctaggtgcgtccaagcacccgcacctgcgatcctcacgcccaactccccttcacgcttctgcgactcctctgtcgcttctgcgaccatcacacctacgcaaaaccagccgcaggtgagatcacacaagaaccaacagctagcaaaaatccaaaaatgtaatgaaatgatccgggcctcgtccgaaactcacccgagccccttgggaccccatccgaacatgccaacaagttccataacattatacggacctactcgaggactcaaaccacacataacaacatcgaaacgacgaataacacctcaactcgaatcaatgaactttgaaatttcaaacttccacaaccgatgccgaaacctatcaaatcatgtccgattatctcaaattttgcacacaagtcgcattcgacattactgacctactccaacttccggaataagaatccgactcctatatcaaaaagtccactcccggtcaatctttccaaaatttcaactttcgccattttgagccaaattcaaccacggacctccaaattacaatacgaacgcgcacctaagtccaaaatcacccaatggagctaacaaaaccatccaaattccaatacaatgtcaaatgctaaaaagttaaacttggtcaagtctttcaaatttaaagctccctagttgagaattattcttccaaatcagtctcgaataacctgaaaacaaaaccaatgattcacacaagtcaaaatacatcatacggatctactcacacccgtaaactaccgagcaaagtgtaaatgctcaaaaataccgatcgggtcgttacatcctaccccacttaaacatgtgttcgtccaggatggtgtcgagacttgtggcatttttatgcctttgtggattatgcatttcagcatcaagaaggtgaaggaaacaattttaagttcacataaggtctccttagaatgggtgtcgtggttgtggcgctttggggtgcttaaaagggaagtcagcgacttatgggccttagggcgttgtggttttatactagggtctcttgtggggtgaattttggttaagaatcatggtgttccattaaggagaagtatcaatttgaaggcaatttggatgggacttggaggaaaaggacatcgtggtagtaggttggatcagcacaataatggatataatcggttctttaggtacttatgatgtggctagcctccacaggtgtttcatggcaatgctcttgggttttggcgacctgcaaggttgggttaagttagagagattcggttctaatagcttggttgtgtgaaaatggtttttgaagagttctcaatgggttttaccacggttcgaggagtatatttcctaccggcgtgaggaatatgttgcgtattaggattttctccgggatgagatcaaatggaaggtttctgactgatcgggtatgtattctgcttgggactcagagttgattatcagattcttgtactcttcacaggatggcatggtagagcggtgtattgtgtgggattgagatttgcatgtggaaggtcactgttcagttttgaagggaaggaaataaattcgtaggcaccatggacggtttcagatgactaggtgaatgatattactttttggtattgcttgaggagagtgtacatttcaggaggcgcactgtgttttgatttannnnnnnnnnnnnnnnnnnnnnnnnnnnnnnnnnnnnnnnnnnnnnnnnnnnnnnnnnnnnnnnnnnnnnnnnnnnnnnnnnnnnnnnnnnnnnnnnnnnnnnnnnnnnnnnnnnnnnnnnnnnnnnnnnnnnnnnnnnnnnnnnnnnnnnnnnnnnnnnnnnnnnnnnnnnnnnnnnnnnnnnnnnnnnnnnnnnnnnnnnnnnnnnnnnnnnnnnnnnnnnnnnnnnnnnnnnnnnnnnnnnnnnnnnnnnnnnnnnnnnnnnnnnnnnnnnnnnnnnnnnnnnnnnnnnnnnnnnnnnnnnnnnnnnnnnnnnnnnnnnnnnnnnnnnnnnnnnnnnnnnnnnnnnnnnnnnnnnnnnnnnnnnnnnnnnnnnnnnnnnnnnnnnnnnnnnnnnnnnnnnnnnnnnnnnnnnnnnnnnnnnnnnnnnnnnnnnnnnnnnnnnnnnnnnnnnnnnnnnnnnnnnnnnnnnnnnnnnnnnnnnnnnnnnnnnnnnnnnnnnnnnnnnnnnnnnnnnnnnnnnnnnnnnnnnnnnnnnnnnnnnnnnnnnnnnnnnnnnnnnnnnnnnnnnnnnnnnnnnnnnnnnnnnnnnnnnnnnnnnnnnnnnnnnnnnnnnnnnnnnnnnnnnnnnnnnnnnnnnnnnnnnnnnnnnnnnnnnnnnnnnnnnnnnnnnnnnnnnnnnnnnnnnnnnnnnnnnnnnnnnnnnnnnnnnnnnnnnnnnnnnnnnnnnnnnnnnnnnnnnnnnnnnnnnnnnnnnnnnnnnnnnnnnnnnnnnnnnnnnnnnnnnnnnnnnnnnnnnnnnnnnnnnnnnnnnnnnnnnnnnnnnnnnnnnnnnnnnnnnnnnnnnnnnnnnnnnnnnnnnnnnnnnnnnnnnnnnnnnnnnnnnnnnnnnnnnnnnnnnnnnnnnnnnnnnnnnnnnnnnnnnnnnnnnnnnnnnnnnnnnnnnnnnnnnnnnnnnnnnnnnnnnnnnnnnnnnnnnnnnnnnnnnnnnnnnnnnnnnnnnnnnnnnnnnnnnnnnnnnnnnnnnnnnnnnnnnnnnnnnnnnnnnnnnnnnnnnnnnnnnnnnnnnnnnnnnnnnnnnnnnnnnnnnnnnnnnnnnnnnnnnnnnngctgtggcactctcctggttgatcgattgctgatttccagatattgcgaagtggcacggaagaattatagaagtattcctcatagtatgatcgtgtatgagagatgtgttagacattcgggcggtggagttgggatcaaatatggcgattcgtgtgttctatggagtttgagactgggggtcttcaggaacagattgtttcatggttgcggactatgaaatcgtggccgaagctagccagatgatagtatgtgttatgattcagttattgtggaccttcagagggttaattatctattggtgggtgaccagagttgacttggggcgggttcattggcaggcccaattagatgtgtattctacatcgcgccggattggttggctccatactgctattattgaaggatgtaccattcggttgttgttgaacttattcgtgttctgaaatgatctgtgagttactcttctatgctacgaggagttgtgattcgttggttacaagcacacctggtgcggttctattcgagctttataccaaaatttgtgcgagatgagtaattgtgtattgcatagttgatggcgtatggttatgttctttcgggttttctatggcattgtgtcatcttcttctccatagttatggtaattcactttgagtacttgatttcggattgtgtgtggttattgattttgagcatgatggctgaggtatttcatatggattagtgtttggatggggtcgcgcatggcagcaaagttatgttgagatattatcctttgtgttagattcgtatgttatggttgtacggtgttttgggttcttagcattgcattagggtggcacccgttgagcttgcgggacggttctcttatttgagtcatgttctcttacgggatgggaatgttgcttattggtgcacgtattgcacgggttgtggctttaaatagtattggtgtggcatgtcagtagcgtagctgggatttgataagatgaagtcgtcggatttaggatgggtgctattagatttgattgtggtatatttggaaggataatatcgaaaggcggcttagagatttgctatgatttttgtcgaaggagagggagctccacgactggtggatctgatgaatggttaagagtttatgcatgtttctttcgtcattggtagtgtacaaatgttttagaatggagtcttgtttgatatgaggtttattaccggttttgggttgttttgagcagctactgtgattagaaatcattgctacgagtatctgtgttatgtggtatatcatgcgattgtatcttgggtcatggttgcggcttggtacaacttgttcagacnnnnnnnnnnnnnnnnnnnnnnnnnnnnnnnnnnnnnnnnnnnnnnnnnnnnnnnnnnnnnnnnnnnnnnnnnnnnnnnnnnnnnnnnnnnnnnnnnnnnnnnnnnnncagatcttatgagaaatttcggatgttggaaattggattctaagacttgtgggctaggttgaattgagaaattttagttatgttgtgttattggacctgtatgggatagggtgacgtgggatcacctccgggtatctgcatggtaaggttatacggcaatttgatggttatgggaacaactcttggctcgttcgaaatgtaactctcagtttctacccatatacacatattgaaaattccaaatcgctacataaaaatcttgaatccatcagaaccatttttgagagtcatccactctactcaaatctcaattaaaccggcaaaactgaccgaacgacctgcgccctattagcacaccaacacccaagggaataacccacactcctgagcaactgagcatattcctactccatgtacactatacctttcacgaataaccactcaattattttatgattcccatacacctatagagtgtaatacaacctgtatcccgaatttcctttacccgagtcatcctcgatctcgacctctgcaagtcataactgattcaccagtataccccgaaccgaaaccaatacaacacatnnnnnnnnnnnnnnnnnnnnnnnnnnnnnnnnnnnnnnnnnnnnnnnnnnnnnnnnnnnnnnnnnnnnnnnnnnnnncaggttctcccacttggctcaaagccacataacaaaacactcgataacatcacgatacccatactctattacttccagaatcccgcactgaaattcaactaaatcctgcataagctcatgtaacacaaaccatataatacctcaaatcatctgtaaatctcgcattcatcctcgtgatagtcaggtccactgttacaaccgatccaaactcaaatcgcacaaatataccccaatggtaaaagagaactctctccaaaacatcataaggatcatacaacctcaggacacctcgcatgagataacccacctgctctacctcaaagtgacatctctctatacccttccacagtcacgactactacgcaaccacttaatcttcttgattctgaactcatcaacaagacatgagaatctacttcactctacaactaaacacacatgagagatccctcaacacacccataactcaagaccatacgccaaatcaagacagaaatcagacaccccacagtccttgctacatctcaagtaaactcttctcgtcacattcgaacaatccgaacacatctaacagtcacatcatactcaccacacagccatttcaccgctcatcgagcgataaatttcactcatagggacattaccggacatatgagtccaaatgtacaagttaccactgaagctaccgagcttaagctacggtctaaccatggcctcaagtccaccagactggcccatcaccaaaatatcgaatacacatctcgaacctcgttcatagaatcacaagccaccgacgcataaccgatatcaagcgctcacatgcgcatacgaatgcatggaaggaattcaaagagttacgcttcaagttgaatcaatgccgtacgataaggaaagaaagatgggaaagtatatcctaaatgtcctgtagcctctcgaagataggtatggacatcatcataccgatccgcaagactctactagacacttgctcatgacttgcagaacctatgaacctagagctctgataccacctgtcacgacccaaaatccaactagttgtgatggcacctaatccaacctgctaggtaagccagttaaccactaaccaattccaataacaattaataaagcaattaagtaaagaaattatctgaatcttatacgttccccaagaactggtagtacaaatcatgagcttctaagnnnnnnnnnnnnnnnnnnnnnnnnnnnnnnnnnnnnnnnnnnnnnnnnnnnnnnnnnnnnnnnnnnnnnnnnnnnnnnnnnnnnnnnnnnnnnnnnnnnnnnnnnnnnnnnnnnnnnnnnnnnnnnnnnnnnnnnnagctgagatgaaataaatacatcgtctgtttgaaaaaaatacataaacagaatttttatagatctaaggctaccacgaacaagaggcagctataatcggaatgcaggtacatcttcaaatccagctcccatcgaacacggcaacatcagcagccaagatatgcacgcaaggtgcagaagtgtagtatgagtacaacagaccccatgtactcaataagtaacaaacctaaccttaggttgaaagtagtgacgagctaacaaaaagatcgggtccaacaccaatattccacaacagttcataacagcatagtacaagtaacaaaagactatctcagaaataaaagactcagttcgttcacagttccaaaaaaatgggcatttcttttcaagtatctcaggaaaaaccaaatcttttacaaaaaaaagccaaaatacgagtaagtttgaaaactgtgatttttcctaaaagtcctttcaacaaatagtaagatgtttcattttcagatagcttaaggaaagtacttctctatgcctacatgtcaagatacaagtaaaatcataaatgtccccaaaactgggtagcataaggaaatgcacctctatgcatgtatcacaagtacgcatgtcaaatgcaatgcatctcgatgatgagctcatgtactnnnnnnnnnnnnnnnnnnnnnnnnnnnnnnnnnnnnnnnnnnnnnnnnnnnnnnnnnnnnnnnnnnnnnnnnnnnnnnttcactatctcgctttatctcttactatgctcagcactctcaatcactcagcgctgtacaatacccgctgcggcgtgcatcccgatccatatttatagtcgactgtgctcactagggtgtgcagactccggaagggctccttttagtccaagcgctatatcgttgcggcgtgcagcccgatcctatagaatgtaatcaatatatcattgtggcgtgcagcgtgatcctataaaatgtaatcaatatatcgattcggcgtgcagcttgatcccaaaatatcactctcactcgggccctcggcctcactcagtcatcaatctctccagtctcactcgcgggctcacactgtcatgaaactagcccgacaataatgatataatgtatcaataaataataattgagattgagatatgatatgaatgcatggatatgcctgagtatgaaatatcaatgaaatcgatgagatgatagtaagaagcgaccactatgggtccaaacagtatcgacataatgcctaaacatgatatctagcatgattgacagcttaactactttatcacatggtgaaaataccagatatcaacaaagtaggaccattatacagtgctatgggaacaacagaatctcaattcacatagtgcacgcccacacgcccgtcacctagcatgtgcgtcaccccaacactaatcacgtaacacgtatattagggtttcataccctcagctccaagattagaagagttacttacctcgaacaagccaattccaacaccgagcaagccaagcgatgctccaaaatgccatatcccgcattccgaccttcgaacggctcgaaactaaccaaaaacaactcaagtacatcaaacaatgctaaaggaaccaatcccgatcgaaaaagatcaaatcttgaatcaaaagcccaaaatcggccaaaacccaaccggcccgcacctcgaaacccgacaaaatttagaaaatccaacaacccattcaattacgagtccaaccatactagtttcactcaaattccactccaattcgatgttcaaaactcaaaatttcatattatgaagctttaggccaaaacccccaatttcctctttaaaattcacaatccaattaccaaaaacgaaggtagattcgtgatataaaataaaaaaaatgagtagggaacacttaccctagtccacaagatgaaaattgcttcaagaatcgcctcaattcgagctccataactccaaaaatgtaaaaatgaaccaaaaccctcgataatatagcttctgcccagcgattcctcatttgcggacaattcgttgcatccacgaccaccgcttttgcggtaaaacttcgcttctgcgaaaacaactgacccaacaatccctcacacttgtggtctttaagccgcttctgcgatctcacttatgcgcacttgaaccgcatctgcggttgcgctggtgcgtccaagcacccgcaccagcgatcctcacggccagctcccctgcacgcttctgcgactcctctgtcgcttttgcaaccatcgcacctgcgcaaaccagtcgtaggtgcgatcacacaagaaccagcagctagcaaaaatcaaaaaatgcaatgaaatggtctgagcctcgtctgaaactcacccgagcccatcgggaccccgtacgtacatgccaacaagtttcataacacaatacggacctacttgaggcctcaaaacacacattaaaacatcaaaatgatgaatcacatctcaactcgaatcaatgaactttaaaatttcaaacttccacaaccgatgccgaaacctatcaaatcacgtccgattgacctcaaattttgcacacaagtcacattcgacattacgnnnnnnnnnnnnnnnnnnnnnnnnnnnnnnnnnnnnnnnnnnnnnnnnnnnnnnnnnnnnnnnnnnnnnnngcctgatccaacttccagaatcggaatccaaatccgatatcaacaagtccgctctcggtcaaactttccaaaatttcaacttccgccatttcaaggcaaattcaaccacggacctccaaatcacaatccggacgcgctcctaagtccaaaatcacccaacagagctaatagaattatcaaaattccaatccgaggtcaaatgctaaaaagtcaaacttggtcaagtctttcaaatttaaagctccctagttgagaattattcttccaaatcagtcccgaataacctgaaaaccaaaccgacgattcacacaagtcaaaatacatcatacggagctactcatgcccataaacaacctagcgaagtgcaaatgctcaaaacgaccgatcgggtcgttacatcttaccccacttaaacatgcgttcgtcctcgaatgtgccaagagttgttcccataaccatcaaattgccgtataaccttaccatgcacatacccgggggtgatcccacgttaccctatcccatacaggtccgataacacaacataactaaaatttctcaattcaacctagcccacaagccttagaatccaatttccaacatccggaatttctcataagatatgaatctcgcaacctacacactgtataagtctgaacaagttgtaccaagccgcaaccatgacccaagatacaatcgcatgatataccacataannnnnnnnnnnnnnnnnnnnnnnnnnnnnnnnnnnnnnnnnnnnnnnnnnnnnnnnnnnnnnnnnnnnnnnnnnnnnnnnnnnnnnnnnnnnnnnnnnnnnnnnnnnnnnnnnnnnnnnnnnnnnnnnnnnnnnnnnnnnnnnnnnnnnnnnnnnnnnnnnnnnnnnnnnnnnnnnnnnnnnnnnnnnnnnnnnnnnnnnnnnnnnnnnnnnnnnnnnnnnnnnnnnnnnnnnnnnnnnnnnnnnnnnnnnnnnnnnnnnnnnnnnnnnnnnnnnnnnnnnnnnnnnnnnnnnnnnnnnnnnnnnnnnnnnnnnnnnnnnnnnnnnnnnnnnnnnnnnnnnnnnnnnnnnnnnnnnnnnnnnnnnnnnnnnnaatcatagtagcttcgcaaaataacccaatgccggtaattaacctcatatcaaacaagactccattctaaaacctttgtacactaccgataatgaaagaaacatgcaaaaactcttaaccatttatcagatccaccagtcgtggagctctctctcctttgacaagaatcatagcaaatttctaagccgcctttcgatattatccttccaaatataccacaatcaaatctgatagtacccatcctaaatccgacaacttcatcttatcaaatcccagctactctactgacatgccacaccaatactagctaaagccacaacccgtgcaatcagtgcaccaataagcaacattcctatcctgcaagagaacatgactcaatcacgaacatgactcaaacaagtgaaccgtcccgtaagctcgacggttgccaccccaacgcaatgctaagaacccatcacaccgtagaaccataacacacgaatctaacacaaaggatcatatctcaacataactctgccgccatgcgcgaccccatcaaaacactgatccatatgaaatacctcagccaccatgctcaaaatcaataaccacacgtaatccgaaatcaagtactcaaggtgcattaccataactatggagaagcagatgacataatgctacataaaacccgaaagaacataacccatatgccattaaccatgcaatacccaattactcatctcgctcaaattctactataaagcacaaataaaaccgcaccaggtgtgcttgtaaccaacgaatcacaactcctcattgcataaaagagtaactcacagattatttcagaacacgaataagtttaacaacaacagaatggtacatccctcaacaatagcagtgtgtagccaaccaatccggcttggtgtagaatacacatcctaattgggcctaccaatggacccccaagtcaactctggtcacccaccaatagataattaaccctccaaaagtccataacgactgaatcataacacatactatcatctggctagcttcggccacgacttcacagtccgcaaccataaaacaatctgttcctaagaaaccctagtctccaactccatagaacacacgaatcaccatatttgatcccaactccaccgcccgaatgtctaacacatctctcatatacgatcatcctacgaggaatacttttataattcttccgtgccacatagcaatatttggaaatcagcagtcgatcaaccaggagagcgccacaacaccaatgaagtatccatagatcaaaacacagtgcgcctcctgaaatgtacactctcctcaagaaataccaaaaagtaatatcattcacctagtcatctgaaaccgtccatgctgcctacgaatttatgtccttcccttcaaaactgaactgtgaccttccatatgtaaatctcaatcccacacaatacaccgcatctaccatgccatcctgtgaagagtacaagaatcttataatcaactctaagtcccaagcagaatacatacccgatcagtcagaacccttccatttgatctcatcccggagaaaatctcaatatgcaacatattcctcacgccggtaggaaatatactcctcgaaccctggtaaaaaccattaagaactcttcaaaaactatttgcacacaaccaagctatcagaaccgaatctctctaactcaacccagcctcgcaggccggcaaaaccctagagcattgccacaaaacacctgtggaggctcgccacatcataagtacccaaagaaccgattatatccattactgtgatgatccaacctactaccacgttgtcctattcctccaagtcccttccaaattgccttcaaattgatacttctccttgctggaacaccatgatccttaaccaaaatttaccacacaaaagaccttagtataaaatcacaacgccctaaggcccataagccgttgacttcctacttaagtaccccaaagcaccacaaccgcgacacccactctaaggagtgtgaacctaacactattttcttcaccttcttgatgctgaaatgcataatctacaatgttataaaaatgccataagtctcaacaccctccaatgtaactctcaatttctagccatagtaatgccaaggtacatccgggagattaatcccgacaggggccagggatattttagcgttaggcttaaaattgttgtccatttcagaatcttcatgctgacatttttcgagagattaatgaactctcttgagtaaatattattgaagtcatctttatttttaacatctatcaaaaaatggtatttatcttttgcataaattttaatttctcctttagagacaaataatcgagcaaaatcagccctaattttgtcaatggaaggtttgcctcgaagaaacttaccgatgatggtccatcggcatgtgtctgcgaggagttcatgttcttcgttgataagaacaaccaccgctttgcgttcaatcacttcatgtgctcttggtggtagtcttacttttagtcccgttcgatttctaactttgtagccctgagctcctacatgagattctagttgcgattgcttgggtattgtgtcgttttccattgctcttctttgcaaaggtggaaaagttttagatgaggaggcatctctgttaatgttggggtccgatggcattggtattttgaggatgggtgtccgaaaatgtcaatggacatgctcattgagcaaaattgggaaaaaaattagtcgttaatcactgtaaagtaaccgttagaagggaagaaagagtgggggagagtagagagaagctcacttctcactctaacatttttttacctcttgtcatcctttcgtgttaaggtttttacaaccaaccctctttataatagtctcgtttgttccgatattttttgactttatagtgaatgaccgttaaacacctataacagcatttgacgtttaaatattttttggctgttatagataaaaaattatccaaaaatcaattattttttatttttaatattacatataaaagattaaaaaattattcaaatttaaaatctcaaatgatatgcatatttcactagttaaatattgaagaaagctcatatattagtaataaattcacaactaaacatataaagatttaaactctaaggtagacattttaaaactacctagcaaaaataaattcttttaagagtgatgtaagaactttgtaattgtagcttgtttcgtagatttcattctcttactagcaacataacgcttgaattggcgaaggtttgtgtccaaatttccagcaaaaaagtattcaatagttttcacttgaagccaatctaagagtttaaaaatattccatctacatatttttttggaatttatccaatgaaaaagttatcatgtgcaaatcttcaaatattatattttatgcaagatagaaatattatttaatggaaaagattgtgtgcatatttttagagttattactagtaatcttaaagaaaatatatggttgataaagaggggtaattttacaaagagtgttttgctataaatatggttattggtgttataggtaaaaaagttgttatagagaggtaaaatataatttaaaaatcggttctaaaaaaatttaacttttatagtgaatggatattatataaggatcctatagagagatctaaccgtatatgaacaagggaagccagaagaaaaaacgacattttatgaagtgatttatctggcaactaatttatcccggtaaaaagaaaggtcacgtaagagaaagtacatttacaagtcatcgtccagcagctttgttttttttttctttttctttgagaatattgcaattgtcaaacacgaagaaaccttagttcctcacaattataccaacatttgcagattaatcaagctatgacgaataaattttgctttagctatggagtttatcacatctatcttacttttccttgtcctattttctgaagaagctgaagacgatggctccggtgagcgcatacgacacctcgttgtaaccctagccggcttagttatggtcgagccaattaagtgcggaaaattgagacgtgctttcgagccgcggatctcaaaagcggcttggtcataagctaatgctgcatcctccggactctcataagttcctagccacagtctcgcgcctctcctattcggatctcttatctccgccgtaaacgtcccccattgccgccgcctcactcctatgtagcgcctccaatcttgcggcgcttttttctcacgcgccaccataggcccctttctttcctcctcggactcggacttttcacagttttcatcacaaagggaggtgttaaagctgttttctgctgaacttgagctagggctattagacaatgcgtcatttgaaaaattctcaaaaacaattggatcattcaaaaggttctgcttgatagattcaaggaaatcaaggttagagaaagataaggtttcatcagctggattcattttcttttccctataatttttggatgactagtttaatttattgcactttcacgtacaaaatgaatggaatgtttgaaaccctactgctacttatacattttcagttttttttttcttgatatgttggtaggaacttccacgaagattacattnnnnnnnnnnnnnnnnnnnnnnnnnnnnnnnnnnnnnnnnnnnnnnnnnnnnnnnnnnnnnnnnnnnnnnnnnnnnnnnnnnnnnnnnnnnnnnnnnnnnnnnnnnnnnnnnnnnnnnnnnnnnnnnnnnnnnnnnnnnnnnnnnnnnnnnnnnnnnnnnnnnnnnnnnnnnnnnnnnnnnnnnnnnnnnnnnnnnnnnnnnnnnnnnnnnnnnnnnnnnnnnnnnnnnnnnnnnnnnnnnnnnnnnnnnnnnnnnnnnnnnnnnnnnnnnnnnnnnnnnnnnnnnnnnnnnnnnnnnnnnnnnnnnnnnnnnnnnnnnnnnnnnnnnnnnnnnnnnnnnnnnnnnnnnnnnnnnnnnnnnnnnnnnnnnnnnnnnnnnnnnnnnnnnnnnnnnnnnnnnnnnnnnnnnnnnnnnnnnnnnnnnnnnnnnnnnnnnnnnnnnnnnnnnnnnnnnnnnnnnnnnnnnnnnnnnnnnnnnnnnnnnnnnnnnnnnnnnnnnnnnnnnnnnnnnnnnnnnnnnnnnnnnnnnnnnnnnnnnnnnnnnnnnnnnnnnnnnnnnnnnnnnnnnnnnnnnnnnnnnnnnnnnnnnnnnnnnnnnnnnnnnnnnnnnnnnnnnnnnnnnnnnnnnnnnnnnnnnnnnnnnnnnnnnnnnnnnnnnnnnnnnnnnnnnnnnnnnnnnnnnnnnnnnnnnnnnnnnnnnnnnnnnnnnnnnnnnnnnnnnnnnnnnnnnnnnnnnnnnnnnnnnnnnnnnnnnnnnnnnnnnnnnnnnnnnnnnnnnnnnnnnnnnnnnnnnnnnnnnnnnnnnnnnnnnnnnnnnnnnnnnnnnnnnnnnnnnnnnnnnnnnnnnnnnnnnnnnnnnnnnnnnnnnnnnnnnnnnnnnnnnnnnnnnnnnnnnnnnnnnnnnnnnnnnnnnnnnnnnnnnnnnnnnnnnnnnnnnnnnnnnnnnnnnnnnnnnnnnncaagcacccgcatattgtgctttttacattcattattgtaaaatttcaagagaaataaataatgtgaactgataatctactatatgtaatgaatattatacttccttcttgaaacgtgagtaaacaactactcacttcatttcaatttacgtgaacctatttgactgggcacggagtttaagaaaatagagaagaattttgaacttgtggtgtaaaatgaggcacatatattttgtgtggctataaattattgtataaaggtaaattatttccaaataaggaaaaaagtcatttttttttacacgaactaaaaaggaaatagattcaaataaattgaaacgggaaaagtatattaatatagtacatcatgtatgacgagatcaccctcatttccaaaaacttcggattgtttatttcaaatcactggaatataatctttgcacgtatataaaggaaagattttatttgataaacaagtttgtattcttatggtgacagcatgtgctaccaaatgtcagaaagcattctctattctaatttcggttggttgaggtaacaaattaaattacttccaccttttcaatttatgtgaactcatttgattgggcacgaaatttaagaaaagatataagacttttgaacttgtgttgtaaaataagggacatatattttgtgtggctataaatcaatgcataaatgtaaattattttcaaataaaaaaagaagttattctttttggcacggactaaaaagaaaataagttcagggaatattaaagtgttgcaggttgatagtgataattcaccttcaaatagtttgataaagaacaagcttatgagtgtaccaatagcttttctgaatttaaaatcttgtttaataatttatatcactctatgattgctggagaattcaaatatagaatgagtacaaaaatactagacgagtatgcatcaatcagcctttccccaaattcaatggccatttttcttttctttttaaattttcttttctttattgaatttactctgggaccaatcttgcagctcctgaaaataaaaaataattttttttatcaatctgcatactcccccgtccccacaatttcatcgccatctccatctaacatgaagacgccagctttcccttctttagtgttaactttcttcatttgttaaaagtacgatgaggtggctctttgttttctttatcaaatctgtcccaaaaattgcatattgttgcatcctttaaataaaatttcttactattaaatgctcttagaagaaggagaaaagaaaaccaccaccgcacatgtcactgaaagagtataacggaaaaggaagaaaaataatgcagacaagattaattagttaacctaagaaaaaaagctggacgccgtaaagaccaccacaagactttgttgacattaactactttcgttctagctcaaaattaaaaaattgtcttagaaaaaattactatcactttaggaattcaaaattaaacttgttaattgttttagattatacccttaatattaataagaatgcatggtnnnnnnnnnnnnnnnnnnnnnnnnnnnnnnnnnnnnnnnnnnnnnnnnnnnnnnnnnnnnnnnnnnnnnnnnnnnnnnnnnnnnnnnnnnnnnnnnnnnnnnnnnnnnnnnnnnnnnnnnnnnnnnnnnnnnnnnnnnnnnnnnnnnnnnnnnnnnnnnnnnnnnnnnnnnnnnnnnnnnnnnnnnnnnnnnnnnnnnnnnnnnnnnnnnnnnnnnnnnnnnnnnnnnnnnnnnnnnnnnnnnnnnnnnnnnnnnnnnnnnnnnnnnnnnnnnnnnnnnnnnnnnnnnnnnnnnnnnnnnnnnnnnnnnnnnnnnnnnnnnnnnnnnnnnnnnnnnnnnnnnnnnnnnnnnnnnnnnnnnnnnnnnnnnnnnnnnnnnnnnnnnnnnnnnnnnnnnnnnnnnnnnnnnnnnnnnnnnnnnnnnnnnnnnnnnnnnnnnnnnnnnnnnnnnnnnnnnnnnnnnnnnnnnnnnnnnnnnnnnnnnnnnnnnnnnnnnnnnnnnnnnnnnnnnnnnnnnnnnnnnnnnnnnnnnnnnnnnnnnnnnnnnnnnnnnnnnnnnnnnnnnnnnnnnnnnnnnnnnnnnnnnnnnnnnnnnnnnnnnnnnnnnnnnnnnnnnnnnnnnnnnnnnnnnnnnnnnnnnnnnnnnnnnnnnnnnnnnnnnnnnnnnnnnnnnnnnnnnnnnnnnnnnnnnnnnnnnnnnnnnnnnnnnnnnnnnnnnnnnnnnnnnnnnnnnnnnnnnnnnnnnnnnnnnnnnnnnnnnnnnnnnnnnnnnnnnnnnnnnnnnnnnnnnnnnnnnnnnnnnnnnnnnnnnnnnnnnnnnnnnnnnnnnnnnnnnnnnnnnnnnnnnnnnnnnnnnnnnnnnnnnnnnnnnnntaaaagaaaaatatcaaactactttcattatatagggatattttaataaactatacgttgtattttattattttgcttaatggatgtgaaaaaagctgaaaggtattttgatatatctatactacattataaacttatttatcctccatcgagagattgtaacttaattttatatatattatataaagtaatgtattatactacaatcttttccattttttctccctcttccatgaatttattttcactctgatgaaaagttctacccctcctaagtgacacaattttttcataatagagcattattatgcaccaacaggccagaaccttcgcccgttggtattcagccaacaggttcaaatcttcttcaagattgttcaagtgatggtgcttactggttggacctcccaagtgatagataaataaatggaagaaagcatgagaaaaaatatattgtataattgaaattatactgaaattttgaatcacacactaatttaaccttatttgggtgtgaaacgtgaagacataagcttaaactacattgacagctactaaaaaacttcgaaactttaaactcaaaactaaattttgcgaaattattatttgtttagattggatgttattgcaaacgattgaaaatattgtttggagtttatatctcaactttgagagagtatggtaaaaaattaatttggtttgggttagaattttagattaaaatttgaagaggcaaaaaataataagttgtatgtattttatatgttgggtgcacaaatgacatacaacatatatacaattaacatagttacataaaaatagtatgtattttatccagattctatacaacaaaaaattatatacaagttgcatataagttatatgtaaattacagtttttaccggattttgtacaacataaacatgtatacaaattatgtataaattgtagcttttgatcggaattgaatatattttataaaaaccttagttactttttgtaaataggaaaatctagctcaatgggtaagtattgtcctaattttgtatatataaaagtactcccaaggtaaaatgatagttaaaatgggacgaagagagtaaattgaaagaatacctgagtagtgtgtttcaataagagaaaaaagtaaatagtacttttttagttggatacggcgaatgattctcgggagacaatttgtctaatatccctaaatataaagagtatttcagatatttgaaatgacgagaaaagaaaaataaaataaagcgaaacccacacggtatgtctactgaaaataccagttaacatcatatataattaaaatattttattttaccatgtatacctactttataaatttattttacattgtatacttattgtatttcaaaataaaatattgtgtcttctaaattagaatattttggtatgtttgatttggatactgtattttaaattaggatactgtaatatgtttgatttggatactgtattataaattagaatattagtgtatgtttgatttgaatattgtattccaaattagaaaattatggaatgcttggtctgtatattgtactccaaattaaaacattatagtatatttggtatagttattgtattttaaattagaatattgtagtatatttggtttgaccattgtatttcaattaaaatattgtagtatgtttgatttgaatattatattccaaattagaatattaggatatgtttgacttgaatattgtactctccattagaataatatgatatgtttggtttatataatgcattctagattagaatattgtggtgtgttcagtttgaataatgtatttaaaattagaataatgtggtatgttcggtttggattgcattccaaattagaatattgtggtatgtttggtttgaatattgtattcttcatagaataatatgatatgtgtgatttggatattgtattccaaattaaaatattctactacgtttagttgaatattatatttcaaattagaatattgtggtatgttcgatttggattgtaatacaaattagaatattgtggtatgtttgatttggattgtaatacaaattagaatattgtagtatgttttagaatatatgagaaagctttggagatatagggtgtaattgtaaagacccgccagtcgttttgagtatataatcccgttcccccatttactgctcaagttatactttacagttgttttatgacttaccgggttagttaattcgggtccgaaaggatttcggtgtgaaatgagacacttagtctcataattgaaaacttaagttggaaaagttgaccgaatattgacttatgtgtaaacgacctcgaatatgaattctgatgattccaatagctctgtatggtgattttggacttaggagcgtgtccgaaaaattatttggaggtccgtagtgaaattaggcttgaaatggcgaaagtaaaattttttggaagtttggccggggggttgactttttgatatcgaggccggaatctgattttgaaaatttgaataggtccgttatgtcatttatgacttgtgtgcaaaatttgaggtcaatcggacgtgaattgataggttccgacgtcgtttgtagaaaattggaagttcaaagttcattaagcttgaattggggtatgattcgtgattttagcatttttttgatgtgatttgaaggctcgactaagttcgtatgatgttttaggacttgttggtatttttggttgaggtctcggggacctcgggtgagtttcagagggttaatgaatagaattcggacttagaagaaaaatctgaaagtttctgccatatgatgcaaccgcacctgcggaaattggctcgcatatgcgaactcacagaaacgagcctggcaagcgcagatgtggaccgggggctgtgaggtagtggtcacaggtgtgagggaatttccatacctacatgatcgcaaatgcgaacggaagggcgcagaagcgagttctccgcagaagtggagcgagcctcgcaaatgcgagcccgcagaagcggctctagtggaggctttggcaaaccgcataagcgattgatttctcgcacctatgagaccacagaagcggctaagtgagttgcaggtgcggaacccctggccaatatacatttcgaaggggtttcgagttttgccatttttgtactttcaagcacagtttttggggcgattttcggagagaattcaaagaaaacttgaggtaagtcgattgtgatcatttctacttcataatattgaattatcatcgaataatccgaccagattacgtgattttgaggtgtaaatcaaggatttgaacctagggatttgaaaataagattggaggatttggaggttgagttgatgtcggaatttagtaaaactggtatggttggacttttggttgaatgagctttcagattttgtaacttttgtcgggttccgagatgtgggctccacgggcaattgttgagttaaatttcagattttattggaaaattagtattttcttatggaattaattccaataatttgtattgactgaatcgaattaattgtgactagatacgaggctttcagatactaattcacgaggcaagagcatagcagaataagaaattacgcgggttaaggtaagtaacatttctaaacttagttctgagggtatgaatctccgaattgatcttatataaattgtttggaggtgacgtatatgatagtgatgaacgtgtagatgtgcaccattgaaagtttgacttgaataaatcctatgaagtcataaattaaagaatcatgttattatctgattgtttttcacgtgttagagaagttgagctgaggctcttaattgagatcatgtttaggttacatgccgatatttttgggacccatggggtcgtgttgctattaaattaaacattttaaaaatgtacattttatactaagtcatattcatccattgtgaggatatttatggatcgagctgcacgccgcagcaggccatattggctatatatatattattattatatggatcgagctgcgtaccgcagcaggccttataggatttattattattattattattattattattattattattattattattattattataatgggatcagactacacgccgtagtaggccatatcagctttatatagcgcttgggctgaaggagcccctccggagtctatacacctccagtgagcgtagatgattatatatacgggatggacttcccaaggcatggacttgccttacttatttatactgttatgtatttttactggatatggatcttgtccgtatcatttataattggggataaattaccccagggatggattggccttatacggtactgagtgactaactgtcagtcgatgtgtatatatatacgagatgaaatatccctgggctgattggccataaacagtaccgagcgaccgaattatttgtgaccagtattacatgaggtctttctactgagatgtcatacctcatatcatgcagtattgatctatttcacttgtactgagtttaactattgaacttgaaagaatgcctatatttttgtaccattatttatactagaatgtacttgcggagctcgtcactactttcagcctagaggttagtcttgttacttattgagttggttgtactcatactacactctgcacctcgtgtgcannnnnnnnnnnnnnnnnnnnnnnnnnnnnnnnnnnnnnnnnnnnnnnnnnnnnnnnnnnnnnnnnnnnnnnnnnnnnnnnnnnnnnnnnnnnnnnnnnnnnnnnnnnnnnnnnnnnnnnnnnnnnnnnnnnnnnnnnnnnnnnnnnnnnnnnnnnnnnnnnnnnnnnnnnnnnnnnnnnnnnnnnnnnnnnnnnnnnnnnnnnnnnnnnnnnnnnnnnnnnnnnnnnnnnnnnnnnnnnnnnnnnnnnnnnnnnnnnnnnnnnnnnnnnnnnnnnnnnnnnnnnnnnnnnnnnnnnnnnnnnnnnnnnnnnnnnnnnnnnnnnnnnnnnnnnnnnnnnnnnnnnnnnnnnnnnnnnnnnnnnnnnnnnnnnnnnnnnnnnnnnnnnnnnnnnnnnnnnnnnnnnnnnnnnnnnnnnnnnnnnnnnnnnnnnnnnnnnnnnnnnnnnnnnnnnnnnnnnnnnnnnnnnnnnnnnnnnnnnnnnnnnnnnnnnnnnnnnnnnnnnnnnnnnnnnnnnnnnnnnnnnnnnnnnnnnnnnnnnnnnnnnnnnnnnnnnnnnnnnnnnnnnnnnnnnnnnnnnnnnnnnnnnnnnnnnnnnnnnnnnnnnnnnnnnnnnnnnnnnnnnnnnnnnnnnnnnnnnnnnnnnnnnnnnnnnnnnnnnnnnnnnnnnnnnnnnnnnnnnnnnnnnnnnnnnnnnnnnnnnnnnnnnnnnnnnnnnnnnnnnnnnnnnnnnnnnnnnnnnnnnnnnnnnnnnnnnnnnnnnnnnnnnnnnnnnnnnnnnnnnnnnnnnnnnnnnnnnnnnnnnnnnnnnnnnnnnnnnnnnnnnnnnnnnnnnnnnnnnnnnnnnnnnnnnnnnnnnnnnnnnnnnnnnnnnnnnnnnnnnnnnnnnnnnnnnnnnnnnnnnnnnnnnnnnnnnnnnnnnnnnnnnnnnnnnnnnnnnnnnnnnnnnnnnnnnnnnnnnnnnnnnnnnnnnnnnnnnnnnnnnnnnnnnnnnnnnnnnnnnnnnnnnnnnnnnnnnnnnnnnnnnnnnnnnnnnnnnnnnnnnnnnnnnnncccggatacagcgactgctaggtttcagagttatttctgttggagactatcaaagtagctgcttgacgtctgcagacttgattcccttcctctttagttattgtactattctatattttcagacagtgattttatcagtcagaatttgtatttatttagatgctcatgtacttagtaacaccggattttgggagtgattataactgtatgaggtttcttccgttgaatttaaatgttatgtttttaaacttaaaagatgtggtggtttattgagattgtcggcttgcctagtattgagatagactccatcacgacatgtgagattttgggtcgtgacaagttggtatcagagcctaggttacataggtctcacgagtcatgaggaggtttagtagagtcttgtggatcgatacgaagacgtctatacttatcttcgagaggctgtcgaacccttaggaaaagttcagcttcttgcattctatcgtacgaatttgtttattccggaaactaaatttctgttattctattctctcacagatagtgaggacacatactactggatcggacggtcagccaccaacgccaccagttagggctgcgagaggccggggccgtggtagaggccggggccgaggtagaggtcgaggtgtagctcatacatcagttgcagcaacacctatagcaccacgagttgctccagctcaggagcagattccagatatagctgagccgacaggaccagctgtgctcattgtgattccaagccttcaagaggctatggcccagatattgacagtttgcactggtcttgctcaggtggcttaggccgcacttgccacttctcaggccgggggaagtactcatacccatgttgcccgtactccagatcaggtagtgcagggacttcagataccgggggcactccccgttatggaagatgatggtcagaggagacttgagagatttgggaggcttcgacctccatcatttagcggtgctgagtcagaggatgctcagggttttctagataagtaccagtggatgcttcggacaacaggtattctggagaccaatggggtctcgttcactacttttctattttctggagcttccttcagttggtgagaggcttatgagaggtgcaggccgattggtgcagtaccacttacatggaaggagttctccgtactcttttaagagaagtttgtgccgcagtctcgtagagagaaactgcgcaggcagtttgagaagttacttcaggacgacatatttgtgatgcaatatgagatgagattttctgagttggctcatcacgcagtttggttggttcccactgataaggagaggattaggaggtttattaatggcctcacatatcagctgcggttacttatgactagggagagggtatctggtgctacttttgatgaggtagttgacattgctcggaagatagagatggtccgtagccaggaacgtttagagagggaggccaagaggcctcgtgggccaggtggtttgagcggtgtcccttcaggggtcagttttactgcggtaggggttgttcttacagacacgctcagacgggtcgtctagttcaccgtggtgcatcatccagcaatggttcatacagttctcatcagggtcagccatctctcggtgaccttctagcccagagtacgccccatgctcctttaattcatggatcatcggtaccaggttcttctggtagttattatggttctcgaggtccgcctcagaacttgccaccattcttcgaaagggagtgttatgagtgtagagagctgggtcatgtgaggaaattttgtccccgccttacttgaggtccagttcagcagagaagtcaggctactacttatgcaccagttatgccaccacctgcccagccagctcggggtggggctcagacagctaggggtcgcccaagagggggaggccgatcaggtagcggtcatgcccgattctatgctttttctgccaggccagatgctgctgattcagatccagtgatcacatgtattgtttcagtgtgccacatggaggcttctatattatttgaacctggttccacttattcatatgtatcatcatattttgctcgttgtccgaatatgccccgtgagtcttagtttcacttgttcgtgtatctacgctagtgggcgatattattactgtggaccgtgtgtatctgtcctgtggtaactattgcagaactagagactagagttgatcttttgttactcggtatcgttgatttcgatgtaattctaggtatggattggttgtctccatgtcatgctattctggactgtcacgtaaaaatcgtgacgttgacgatgccggggttgccaaaggttgaatnnnnnnnnnnnnnnnnnnnnnnnnnnnnnnnnnnnnnnnnnnnnnnnnnnnnnnnnnnnnnnnnnnnnnnnnnnnnnnnnnnnnnnnnnnnnnnnnnnnnnnnnnnnnnnnnnnnnnnnnnnnnnnnnnnnnnnnnnnnnnnnnnnnnnnnnnnnnnnnnnnnnnnnnnnnnnnnnnnnnnnnnnnnnnnnnnnnnnnnnnnnnnnnnnnnnnnnnnnnnnnnnnnnnnnnnnnnnnnnnnnnnnnnnnnnnnnnnnnnnnnnnnnnnnnnnnnnnnnnnnnnnnnnnnnnnnnnnnnnnncctttgtgagagatgttgatgtaggtactcctcctattgattcagtatcgatagtgcgagaattttcggatgtatttcctgcggacctgcagggtatgccacccgacaggaatattgatttcggtattgacttggtgctgggcactcaacccatttctattcctctgtatcgtatggcaccagctgagttgaaagaattgaaagagcaacttcaggaactccttgataaggggtttattacgcctagtgtgtcaccttagggtgcaccagttctgtttgtaaaaaataaagatggtactatgcggatgtgcatcgattacaggcatctgaacaaagttacaatcaagaataaatatcctttgccgcataatgatgatttatttgaccagcttcaaggagcgagggtgttctccaaaattgatttgagatctgggtatcaccagttgaaaatttaggattcagatattctaaagacggcattcaggactcgttatggccattatgaatttctcatgatgtcttttgggctgaccaatgccccagcagcatttatgcacttgatgaatagtgtatttcagccatattttgatttatttgtcgtagtatttattgatgatatcctggtgtactcacgtagttaggaggacacttgggtattgtattacagagactgagagaggagagactttatgccaaattctctaagtgtgagttttggcttagttcggtggcattcttgggacatatagtgtccagtgaaggaattaaggtggatccgaagaaaatagaggtagttcagagttggcccaagccatcttcagctactgagattcgtagttttctcggcttagctagttattatcatcgctttgtggagggtttctcgtctattgcatcgcctttgactaaattgacccagaaaggtgctccgtttaggtggtcggatgagtgtgaagagagcttttagaagctcaagacaactttgactacagccccaatgttggtgttgcctacatgttcagagtcttatactgtgtattgtgatgcgtcgcgtattggtctcggcgcaatgctgatgcaagacggtaggttgattacctatgcatccagacagttaaaggtacatgagaagaattatcatgtccatgaccttgagttagcagctattgttcatgccttgaagatttggcagcattatttgtacggcgtccattatgaaatgtataccaatcaccggagtctacaacatttgtttaaacataaggatcttaatttgcggcagcggaggtggttagagtttcttaaggattatgatatcaccattctctatcatcccggaaaggccaatatggtggccgatgccttgagtcgtaaggcagagagtttgggcagcttagcatacttaccgatagcagagaggcctttagccttggatgttcaggccttggctaactagttcgttagattggatgttttggaaccgaatcgagttttggcttatgtggtgtctcagtcttctctctatgatcgtatcagagaacgtcagtatgatgacccccatctgcttgtccttaaggacacgattcaacacggtgatgccaaggaagtcactattggggatgacagcatattacggatgcagggcaggctatgtgttcctaatgtagatgggttacgggagttgattctccaggaggctcacagttcgcggtactccattcatccaggtgccgcgaagatgtatccggatttgaggaagcactattagtggaggcgaatgaagaaatatgtagttggatttgtagctcgatgtttaaattgtcaacatgtaaagtacgagcatcagagaccgggcggattacttcagagacttgaaattttggagtggaagtgggagcgtatttccatggactttgtagttgggctcccatggaccttgaggaagtttgatgttgtttgggtgattgtagaccagttgaccaaatccacgcattttattccaattggtactaattattcttcggagcggttagctgggatttatatccgcgagattgttcacctacacggtgtgccagtgtccatcatttcagatcggggcacgcagtttacatcatagttttggagagcagtgcaacgggaattgggcacacaggttcagttgagtacaacatttaaccctcagacagacggacagtccaagcgcactattcagatattggaggatatgctacgcacttgtgtcattgattttggtggttcttgggatcaatttctgccactcggcggagtttgcttacaataacagctaccaatcgattattcagatgactccatatgaggctttatatgggagacggtgccggtcgccggtggattagtttgagccgggttatccagtgttccatgtatccatgctccgaaagtatgtcggggatccgtctcatattttggatttcagtacagtacaactcgacggtagtttgacttatgaggtagagctagtggctattttagaccggcagattcgaaagctgaggtcaaagaaaatagcatcagtgaaggtagaatggagaggacatccagtcggagaagctacttgggatattgagcaggagatgcggagcaaatatcaacaactatttgtgacttcaggtatgattctaaacccgttcgaggacgaatgtttgtttaagagggggagaatgtaacaacccagacggtcgttttgagtatataacccagttcccccatttattgctcaagttatgctttacatttgttttatgacttaccgggttagttggttcgggtccgtaaggatttcagagtgatatgagacacttagtctcataattgaaaacttaagttggaaaggttgacaggatattgacttatatgtaaatgacctcggatttgaattctaatgattccaatagctctatatggtgattttggacttaggagcgtgtccggaaaattatttggaggtccgtagtggaattaggcttgaaatggtgaaagttgaatttttgggaagtttnnnnnnnnnnnnnnnnnnnnnnnnnnnnnnnnnnnnnnnnnnnnnnnnnnnnnnnnnnnnnnnnnnnnnnnnnnnnnnnnnnnnnnnnnnnnnnnnnnnnnnnnnnnnnnnnnnnnnnnnnnnnnnnnnnnnnnnnnnnnnnnnnnnnnnnnnnnnnnnnnnnnnnnnnnnnnnnnnnnnnnnnnnnnnnnnnnnnnnnnnnnnnnnnnnnnnnnnnnnnnnnnnnnnnnnnnnnnnnnnnnnnnnnnnnnnnnnnnnnnnnnnnnnnnnnnnnnnnnnnnnnnnnnnnnnnnnnnnnnnnnnnnnnnnnnnnnnnnnnnnnnnnnnnnnnnnnnnnnnnnnnnnnnnnnnnnnnnnnnnnnnnnnnnnnnnnnnnnnnnnnnnnnnnnnnnnnnnnnnnnnnnnnnnnnnnnnnnnnnnnnnnnnnnnnnnnnnnnnnnnnnnnnnnnnnnnnnnnnnnnnnnnnnnnnnnnnnnnnnnnnnnnnnnnnnnnnnnnnnnnnnnnnnnnnnnnnnnnnnnnnnnnnnnnnnnnnnnnnnnnnnnnnnnnnnnnnnnnnnnnnnnnnnnnnnnnnnnnnnnnnnnnnnnnnnnnnnnnnnnnnnnnnnnnnnnnnnnnnnnnnnnnnnnnnnnnnnnnnnnnnnnnnnnnnnnnnnnnnnnnnnnnnnnnnnnnnnnnnnnnnnnnnnnnnnnnnnnnnnnnnnnnnnnnnnnnnnnnnnnnnnnnnnnnnnnnnnnnnnnnnnnnnnnnnnnnnnnnnnnnnnnnnnnnnnnnnnnnnnnnnnnnnnnnnnnnnnnnnnnnnnnnnnnnnnnnnnnnnnnnnnnnnnnnnnnnnnnnnnnnnnnnnnnnnnnnnnnnnnnnnnnnnnnnnnnnnnnnnnnnnnnnnnnnnnnnnnnnnnnnnnnnnnnnnnnnnnnnnnnnnnnnnnnnnnnnnnnnnnnnnnnnnnnnnnnnnnnnnnnnnnnnnnnnnnnnnnnnnnnnnnnnnnnnnnnnnnnnnnnnnnnnnnnnnnnnnnnnnnnnnnnnnnnnnnnnnnnnnnnnnnnnnnnnnnnnnnnnnnnnnnnnnnnnnnnnnnnnnnnnnnnnnnnnnnnnnnnnnnnnnnnnnnnnnnnnnnnnnnnnnnnnnnnnnnnnnnnnnnnnnnnnnnnnnnnnnnnnnnnnnnnnnnnnnnnnnnnnnnnnnnnnnnnnggttgactttttgatatcgacgtcggaatctgattctggaaatttgaataggtccggtatgtcatttatgacttgtgtgcaaaatttgaggtcaatcggacgtgaattgataggttccagcttcgtttgtagaaaattggaagtttcatagttcattaggcttgaattgggggtatgattcgtggttttagcattgtgttatgtgatttgaaggctcgaataagttcatatgatgttttaggacttgttggtatttttggttgaggtcccgggggcctcgggtgagtttcagatagttaacgaatcaaattcggacttaaaagaaaaatctaaaagtttctgccatctgatgcaatcacacctgcgaaaattggctagcaggtgtgagctcccagaagtgagcctagaaagtgcagctacggacagggggctgtgaggtagtgttcgcaggtgtgaggaaatttctgcccctgcgtgatcgcagatgcgaacggatgggcacagaagcgagttctccgcaaaagaggagcaagcctcgcaaatgcgagcccgcagaaacggctcctagctcgcagaaacgactccagtggaggctttggcaaacagcagaagcggttgatttcttgcacctgcgggaccacagtagcggctaagtgagtcacaagtgcggaacccttggacagtatacatttcgaaggggttacgagttttgccatttttggaccttcaagcacggcttttggggcgattttcagagagaattcaaggaaaacttgaggtaagtcacttgtgatcatttctacttcaaattattgaattatcatcgaataatccgactagattacgtgattttgaggtgtatatcgtggatttaaacttagggatttgaaaataagattggaggatttggaggtcaagttggtgtcggaatttagtaaaattggtatggtaggactcgtggttgaatgtgctttaggattttgtaacttttgccgggttccgagatgtgggctccacgggcgatttttgagttaaatttcggatttcattggaaaattagtattttcttatggaattaatttcaataatttgtatcaactgaatcgaattaattttggctagatatgaggctttcagagaccaattcacgaggaaagagcatagcggagtaagaaattatgcggtttgaggtaagtaacattgctaaaattggttctgagggtatgaatccccgaattgatgttatataaattgtttggaggtgacgtacacgatagtgacgagtgcgcagacgtgcaccattgaaattttgatttgaacaaatcctatgaagtcgtatattaaagaatcatgttattatctgaatcttttccacgtgttagagaagttgagcttaggctcttaataaagatcatgtttaggttacgtgccgatatttttgggacccatggggtcgtgttgctgttaaattaaacgttttaaaaatgtacattttgtactaagtcatattcattcactgtaaggatatttatggatcgagctgcgtgccgcagcatgccatattggtttgatacatattattattatatggatcgagctgcgcactgcagcaggccttataggctttatttttattattatgggatcgcactgcacgccacagtacgctatatgtgctttatataacgcttgagctgaaggagcccatacggagtctgtacaccccaagtgagcgtagattattatatatacgggatggaattcccagggcatggacttgccttacttatttatactgtgatgtattttcccttgacatggatcttgtctatatcatttacaattagggataaattaccccaggggtggattggccttatacggtactgagtgactaattgtttgttgatgtgtatatatatacgggatggaatatccctgggctgattggccataaatagtaccgagtgaccgaatgatttgtgaccagtattacatgaggtctttcaactgagatgtcatatacctcatatcatgcagtattgatctatttcacttgtactgagtttaactgttgaacttgtaagcatgactacatttttgtaccattatttatattggactgtacctgcggagctcgtcactactttcatcccagaggttagtcttgttacttattgagttggttgtactcatactacaccctgcacctcgtgtgcagatctaggtgctcccggatacggcgactgctagatttgagagttatttctgttggagactatcgaggtagtttcttgacgtccgcatacttgattcccttcttgtttagttattgtactgttctatattttcagacagtgattttatcagccagactttgtattcatttagatgctcatgtactcagtgacaccgggttttgggagtgattataactgtattgtgaaatttcttccgttgaatttaaatattatgtttttaatcttaaaaaatgtggtggtttattgagattgttgtcttgcctagtattgagataggcgccatcacgataggtgagattttgggtcgtgacagtaatacatttgaaatatttgatgcaatttcaaaacataggtatataagaaaagtgagttttacaaatgtgtatattatgaaatatgtaagaattttaggagaatgggatatttcccaaagcttctgctgtaagaagctacgtaaacgtttgagcaaataacttcaataatatagttgaatcacaacatgagagcaaaagagagaatacagtctagagatcagatagaaagaatgccattggtttaacctaatttaacaaatatagtggctaataaataatggatttgtatttaattagaagattatgggttacctagatgtcacgatccaaaatctcaacccgtcgtaatggtgcctaacacaccagctaggcaagccgaaatatgataaccaaggcaacatagtaacgaaattcatataaataacatatatctgaggtctcaatacaataaaactactaatacaaagtatttcccccagaaactggtaagtatggagtcatgagcttctacaacggaatacaagtctgaaactgaacaataaatacattaattatactataacaatagtgtgaaaggaaaagacaagtcaaactgcgaccaaggatgcagctctacctcgcttctagtagatagtccaacaagcaacctactgctgataactggtccccataccttgatctgcacatttaagtgcagagtgtagtatgagtacaaccaacccaatatactcaataagtatcattaataaacacggcaaggtaagagaagcacaaattattaatgatactagctatcacctgtgtagttttatcctttaaatcagtacagaacaatgttggaatcaaattataaattttagtatgaaaacatccgtgtgtgtatgtgtacaatttctcaagtactctactcagacaatatcatggcagaggtgacatgcagttaaatcagataaatgattaaggaaattacaaataaagatgaaataaaaaatccaatagaacactagccaggttccctaacatttccatatccgttccaaaccacttatcaatattctaaatattcgcgtgtacaccatcacgagagaaacatgagagggtgaccctagggggatggatccatatccacacgttgcacggataattcacgtgctaataatagaaatcgcacggacaaactcatgtgctaataatagaacccgcacggataactcacgtgttgcacaaacaattcacatgctagtaacatcaatatctagactcgcacagataactcacgtgtcaataacacaatccgtccggatggtcaaaagcacaacaacacaatctgcctgccgtggtcacaggcacccagtccaatcatatcatataggagcaaataaataagtacacatgtatgaaacgagtgaataacaaatctcatgctcgtgggctggtataaacgacatgctaacgtgtaggcatgtgaaagtgtactatcataactcaaaccaacaaatttcatcaaagaataacatttatcagtttattcagggattaaaccactatgtagcatcaaacatggctcaaatagttcacaataggggtgggcgtcggctggttcggttcggtttgttcgatttttggttttctatttggtgcagcaataaccgaaccaaaactacttcggtttcttcggtttttgttaattcgtttcagtcgattttcggttcaatttggtctgtttgatcttgtcgtattaagcttttaaatcggactactaaaaaatatgactaatttatattttagtgcaactaaaactaatacttataatatgattagccaaattatttagttgatgtaggaaatataaatttatttgaaaaaacatacttacaatataactatctcgtagaccacaacatcggcggcacgcaagtaaaacaaagatgaaagatgcattggcaaacatgttattgttattattgttgttaatatttcttctcataaaacaaatgaaaaaaaacgaactgacggcattggtgtacttgattttccattcttaggaagatatgactcagaaggtaccaaaagtaaaagattaggcggaatggataatttacagaatgtgggactttatttgactttgggtttcatattttataatgtaaacatgtggaaaagttgggctagacaacttaagaagagcccagaagctaggacccatattagaaaattttgattttccggtttaaccgaaaatagaagttgcaaaactgagcaccaaaccaaataccaaaattatagaaaacataaaccgcaaaccgactgaataagccaaaaaatcgaaattgaataaatcgaagtttacggttcgatcgattttttcggttcgatcggtattatgcccacccctagttcacaacaatatcacaatctgtgaagcatcgaagcttaaggtataacagttaaattctaggcttataagagcctaagcacaacccgaacatgaataaataaccccggtgtccgcacatgggttcatccccatgcatgtgcgcacccaataacacgtatctattacaacaattcaggcaactagtgcctcaccgagtttaaataagatacttacctcaaacaaatcaaattactccgctagaaagcccttcccacgcgtatcaatcttcggaaggctcgaatctagccaaaaataacgtaatactatcaataaaatctataggaattgattccaaatgataaagttaaaatctttaaacaaaatcaaaatgtcaaccgggggcccacgtctcgaaatccgataaaatttataaaatccaaactctaattcaataatgagtccaaccatactaaaattattcaaatccggccttaaattgactttcaaatccccaaaattcgatctatgaagtttcacaaatttcctccaaattttccaactcaaaacaccaattaaatgacaaaaataatgatggattcatgcataatagctaaattttagttagaaccacttaccccgataacttcattgaaaattcctcaaaatatcgtcacaatccgagctctctaggtcaaaacatgaagaatgaatggaaaacactcgaactttctatttctaccgaacgattttctcttttgtggctccgcacctatagaaaatccatcgcaagtgcggcttcaactcaagccaacaatctccacttctgcggtccaaatagcgcacatgcacttccgcttctgcgggcaacaagtgcttgtgcgcacacgcatatgcggaccaagtgcacttctgcgccctcaggccatcttagccaattccacttgtgcgacctctcttccacatctacgaccttgcaggtgtggaatattcctcgcaactacgcttctaggcctcctccccaaatctcgcacctgcgacgacacacatgtacctgcagacactccctccgcaggtgcgatgacactagacttcagcaataacaacatccctctaagtccaaatttcaattccttttcaatctgaatctcatccaaggaccccgggaccccatccaaatatgtcaacaagtccaaaaacaagatacaaactcaaattgtaacaccctggaaaattttgaagtacttaagtgctaattatattattttatgtacagacgaggactattaatatcatggatattaattggatatgataataaaagtacgagtcatagtataagtgatgtggggtctaaggagatccctaagtataagccaagttggaaattacatgatagactaaagttccaaatgagtacgcacaagaccaaatttgggatgcgcatatctacatatatatataaggcgttatgtgatggacaacctataaaataaaagctcttcgagtctagtttctaacgcttcacaccacttgtcatttggacactcctacaagaatttatgaacaaattcccaaaggctagatctgcggtcaattttgctattgcaaaacggttccgcggaccgcataagcatcgcaaagtggagcagagacagacaaattttgaaaaaaactattctactaccatataattaattatgcgatcacataatcgattatagtatcgcataatcgattatgctatcgcaaaatcaattatgctgcccgtaaaacgattatgctatagcataattgactttaggggtcattattggaaattttcgtatccaatccaattttgatataaggccttagggggtcattttagaaggtaaaatgtgatattttagacagaggagagagctatcttagagacaaaaagagaagacctagctattttgttcatcaattcttgctcaaggtttgaggatttcataagatcttcatctaataagtaagattctactccctagacctatattttgggatttggattaaagggtgtgagagtattatgtatacatgtatgtaccaataaggtttgtgggaagattgttgagtttaaataagtaaagattgggttgtggaatgaaggaaatcttgtagaagaaccttgtagccaaatttgcacacctagtgtttgataaaatgctcaaatgagctgaaaccatgaatatcttcctaatttgtgttcagttttgttttgtctcaaaatagattgggattgctagaattttcggaacgttgtagtaattaaaggaaagctcaaagcaaggtatgttggctaaactactctcttagaaatgaattccatgttgtccccgtaagtttcaagtatggtcttctcaagttccttattctatgttctgagatgtttccaataaattcaattgtcccgaataagcaatgtgtcgagaattatgtattcaaaacgtgttacgaatgttcctatcacattatgttatcctttgggaatatgttcaagaatgatatgtgtattaaaatgctatgtctttgagtcatgtttaaaatgaaggctatgataccaaattgtgtgagaaaatctcaatatgcataagactcttaattgctcatatgtgtacctaaagtcttgattgaaaataacttattgttgataatctataaagatggttggaagtgaaataagcgaattggggatataaagtgtggccaacgtgctaagagtgaaagttatacttgtggccaatggtgccaatggaatgaaatgatgtgagaaagattatgaaatgagctttgattcgactgttcaaaaattgacttcgaaaatagaattgcctaaaagcttatgaactcaagtgatgcccatatgtggttgttttaattaatgctatgctttgtaagtagtttctatgggttttgcgttcttacatattcctgagttgaaattgtgtattgccctttttgggaaaaagtatttcaagaataaatgatgtgttacttgtttattattttaacttgcgcttcgattgccaatcattttactccatttattggaaagaaatctattgtgtttaaaatcttcatttctaatgaatttaaagttgtgattttcggaatattctatatattgatatttatgatgatgacccatgaaaggataaaaataaaagtgtgaaatatgaaatacgaccattgtgccatgaatgaagaatcatatgtatggccaaaagaactaatgaaataatgatgttgaaagttgttgaaagtgccaatgaggctatatatagtatgaatggttatgaggtaaatgcatttgtattgttgtttcctttgtaagcaaatcaaaaaatatttttgggagtatcgatagtcactaataaagggtaggttgaaataacctaaccccgaaactacacatgccggtgtagaagtggattgtaattattcctcatatttgggatgggattgatgtgataaaagcattccccttaattgggatgagatgattgatagaaaaggatgatgtcgagccacataacattgcggtaagatggcctagccgatcgggccgtgatcgcacaccatgctgcacacatggtggtgattgtgctagaaattataattgaaattgggattgtggttgatgtctcggataagatggcctagccgatcgggtcgtgatcggactccgtgctaaaagtacggtggtattggtattgtgaataatcgtattgtaaaaggtaatattgtgaacagtggtatatcggtgctaaagatctcccaacaaaaaataatattatcttcatattttggaaattattatgttttaacttggaaattggatatcactgattgtttattgttgtttccatgatattttcttttatgttggcattctattttgaaagagaacagttagctttacatactagtactattccatatgtactaacgtcccttttgccgggggtgctgcatctttagtggattcaggtggttcatcagcgggcaactttggtcctcattagcagtcactctctattcaacaggttttggtgagccctactctattccgtgctttatgtcatcttatgttgtattttgtactatgagatatagtcggggccttgtcgccgtcactttcattcttcacttctgttatacttagaggctccgtagacaggttgtgagtggtagtcgatgttggaaattgaactacaaatgttggtatttgtcaaacatgttttttattatatttataaacttgtaatattttggcgattatgaatgaagttgctaatggaaaagaaatgggagttgttaatgaaattttttcaatgtttgattaatggagtacatctcctctttattcatggatgagtttgggtagaagaaaatctaataggcttgctcggccgggttcactcggnnnnnnnnnnnnnnnnnnnnnnnnnnnnnnnnnnnnnnnnnnnnnnnnnnnnnnnnnnnnnnnnnnnnnnnnnnnnnnnnnnnnnnnnnnnnnnnnnnnnnnnnnnnnnnnnnnnnnnnnnnnnnnnnnnnnnnnnnnnnnnnnnnnnnnnnnnnnnnnnnnnnnnnnnnnnnnnnnnnnnnnnnnnnnnnnnnnnnnnnnnnnnnnnnnnnnnnnnnnnnnnnnnnnnnnnnnnnnnnnnnnnnnnnnnnnnnnnnnnnnnnnnnnnnnnnnnnnnnnnnnnnnnnnnnnnnnnnnnnnnnnnnnnnnnnnnnnnnnnnnnnnnnnnnnnnnnnnnnnnnnnnnnnnnnnnnnnnnnnnnnnnnnnnnnnnnnnnnnnnnnnnnnnnnnnnnnnnnnnnnnnnnnnnnnnnnnnnnnnnnnnnnnnnnnnnnnnnnnnnnnnnnnnnnnnnnnnnnnnnnnnnnnnnnnnnnnnnnnnnnnnnnnnnnnnnnnnnnnnnnnnnnnnnnnnnnnnnnnnnnnnnnnnnnnnnnnnnnnnnnnnnnnnnnnnnnnnnnnnnnnnnnnnnnnnnnnnnnnnnnnnnnnnnnnnnnnnnnnnnnnnnnnnnnnnnnnnnnnnnnnnnnnnnnnnnnnnnnnnnnnnnnnnnnnnnnnnnnnnnnnnnnnnnnnnnnnnnnnnnnnnnnnnnnnnnnnnnnnnnnnnnnnnnnnnnnnnnnnnnnnnnnnnnnnnnnnnnnnnnnnnnnnnnnnnnnnnnnnnnnnnnnnnnnnnnnnnnnnnnnnnnnnnnnnnnnnnnnnnnnnnnnnnnnnnnnnnnnnnnnnnnnnnnnnnnnnnnnnnnnnnnnnnnnnnnnnnnnnnnnnnnnnnnnnnnnnnnnnnnnnnnnnnnnnnnnnnnnnnnnnnnnnnnnnnnnnnnnnnnnnnnnnnnnnnnnnnnnnnnnnnnnnnnnnnnnnnnnnnnnnnnnnnnnnnnnnnnnnnnnnnnnnnnnnnnnnnnnnnnnnnnnnnnnnnnnnnnnnnnnnnnnnnnnnnnnnnnnnnnnnnnnnnnnnnnnnnnnnnnnnnnnnnnnnnnnnnnnnnnnnnnnnnnnnnnnnnnnnnnnnnnnnnnnnnnnnnnnnnnnnnnnnnnnnnnnnnnnnnnnnnnnnnnnnnnnnnnnnnnnnnnncgctggtcgcgctccccgatttcgaggcatgacacaaatcacatcaaacatcaccaaaaacacgaatcatacccaattcaagactaatgaaactaataaattttcaatttctacaatcgatatcgaaacctatcaaaccaactctgattgacctcaaattttgcacacaagtcataaacgacacaacagacctaatccaacttccggaaccaaagttcgagcccggtaaccataaagtcaactctcggtcaaacttttcaactctccaaacttcaacttttctaacattcgccaattcaagccaaaatcatctacggacctgaaaatcaacatctcgacaaactcctaagtcaaaaatcaccatatggagctatcgaaaccataaaaactctattctggagtcatttacacatatttcaacatccggttgactcttccaacttaggtttccaaccttgagattaggtgtctcaactcattccgaaacatcttcgaaaccaaaccaaccacctcgtcaagtcatgtaacaacaaatgaacatagaataagcaataaatgggggaatgacgctgcaatactcaaaaagaccggccaggtcattacattctccccctcttaaacaaactttcatcctcaaatgggtctagaataatacttggagtctcaaataggtgtggatatatgctttgcatctcccgctcgttctcccaagaagcctcctcgactggatggcctctccactgcaccttcactgaaattatattctttgacctcaactttcaaacctgccgatccaaaatggccactggctccacatcataagtcaaactccatctaacagaactgtgctgaagtccaaaacatgagatggatcactgaaatacttacggagcatgaaaacataaacacttgaagaacactcgatagactaggtggtaatgcaagcttgtaagccatatctccagtcctctcaagcacctcaaaagggacaatatactgagggatcaactttcccttcttctcgaacctcataatacctttcatgggcgaaactatgagcaataccttctcccccaccatgtaggcaacatcacaaaccttccgatcggtgtaattcttctgtctaaactatgctgtgcgaagttgatcctgaatcaacttaacctttttcaaagcatcctgaatcaagtcagtacccaatagccaagcctctcacgttcaaaccaaccaaccggagactaataccgcctcctatacaaggcctcatacggagccatctgaatactcgattgatagttgttgttgtaggcaaactctgcaatcgtagaaactgatcccaaggacccccgaagtccatgacacacgcgcgtagcatatcctccaatatctgaatggtgcgctcggattgtccatccatctaaaggtggaatgttatactcaactcaacccgtgtgcctaactctcgatgcactaatatccaaaatttcgatgtgaactgtgtgccccgatctgaaataatagacatcggcacaccgtgaaggtgaacaatctcacgtatatagatctcaaccaaccgctccgaagaataggtagtcccaactggaattaaatgtgcggacgtagtcaactggtccacaatcacctaaatagcatcaaacttcctcaaagttcgtgggagcccaactacgaaatccatggtgatacactcccatttccactcaggaatctcaagcctctgaagcaaaccacccgtcctatgatgctcgtgcttcacctgctggaaattcaagcattgagctacaaactccacaatgtcttttttcattattctccaccaatagtgcttcctcaagtcccgatacatctttgcagcagccgggtgaatggaataccgcaaactttgggcctcctctagaatcaactaatgtagctcatccatattgggcacacaaatctgaccctgcatctgtaacacctcatcatccaccatagaaacctccttggcatcaccgtactgaaccgtgtctttaaggacaagcaaatgggggtcgtcatactaacactctctgatgcgatcatataaagaagaccgagaaaccacacaagctagaactcgactaggctccgaaacatctaaccttatgaactcattgtccaaggcttgaaaatccgatgcaagtgatctctcaccaacaagaatatatgcaaggctacccatacttaccgccttcctactcaaggcatcggccactacattggccttcccgggatgataaaaaatggtaatatcatagttttttaacagctccaaccatcttcgttgcctcaaatttagataagcgatcaaactcattatcaagacacacctaataccaatctgagaagcatcacaatacactgtgtaagaacctgatgcgaaggcaaaactagaactggagctatcagtcttgagcttctaaaagctctcctcacactcattcaaccacctaaatggagtactcttccgggtcaacctggtcaatggcactgcaatggacgagaaaccctccacaaagcgataataatatctggccaagtcgagaaaattctgaatctcagcagttgaagatggtctgggccaattctaaacctcgcgcatccttcgtataaaaatctcttggctctactcgtgcatctgtaagatactctttaaaggtgttaggatacggataagatgtgtcagcttgcctggcgaccataaagatgttgtccgacatcacgacacccttattgattgggtacccggccatgatggaggcgataagaactacccgcgggatcggaagatatgtctcattctgacacgggtctagtcggcttcatacaaaggtctgccacacctttgcctcaaaacgcaaagtatttgtgtgaataggcacccctattgtgatctatggtggtggtggcccaggagctgctagaatctcaactagccatgggcgagctgcatccccaagtgaaaacttctctaaatactctgtgggctcgacatcatcaaaccccaagtaggtattcaatgtgtgttggtcaaaatgcaccttgaggttcctcactttagtcatatttttcctttcatgatatgcgccacattggcatagagctcccggaaaaggtattcctttacatctaccacgctctggtgaaccacatccaccctttgcgctctcgaaactgcctcaaaactacaaggttatacctttctagatctctcaactataactatcactcaagagtgagcgaactcactggctaccactcacagaagctagaaaaggaatctaaactgatgaaccggtcctcccacacctctttcttcttcgaccgctcaaggccggcaactgtagcatctccccatcggccataatctgaaatgtcctgaactgatgtctctggtgcttgggggacaggtgtagtggaaggctcaaaagcctgactggcactctccgaaacctcggaggtgttatgtggtgaagacggctcatccctgacctgatatctccctagtgtccttgattgcatggccgactgctcatgaacttagggtgagttgcccttggagacgtccctagacgggacataagaactggtctccgagaggtctgcacctctccctctgccgactgctaacttctttctacttttaagatgttgggcaatgggtaagggtctcttccctcgtccccgagaagggtcaccccttccttttgaaatgtctctttatcctctagatcgaaccatattctgtaccaaacaaaggcgattgttagttgcaattcaatttcagacacataatgaatgcaaggacacacaagagattacagtggaaaaacacagtagaaacatgcttgcagggtagggaattgtgatccgcacaattgtcattgcgatcgcataatgggcattgcggacaatacacttttcctttgcggccccaaaaatgtattgcgatccgcacatttctcattgcggccgcagaaccattccttactatagtgccctagaccttaacttatgcggaccacacaatttcttgtacggtcagagataccaacaattacgaatatatggccgtttttcacctagggcttgagatgtttgcacaatatttacatggaaacaatatctaatcttgagaaacaatttaccaattccccttagagcagttaccagtttacccactacatatttaccccacatggttgttcaaaaagatttaatcaaacaaatggtccaaaatttcactaaaactctaaaatttaaaatatattaatcaagatgatgatgcataccagatatgaatgagtgcaagagataagtgatcaacagttgttaggcttgtgagcagataatgtaacaaacaatttcaatttagtgtgtgagcttagagaggcaaaagggaacaatgccctagcctcttctatttgtagtgatcggtttatggcaagtgaaggggaggtgagtgcggccgcaaaattccaattacggtccgcactctgttatctgagggcccatatgccctagcattttgcggtctgcataatttgttgtgcgtctgcggattctgttgcggtccgcagaatttgggttgtggccacagattggccatttctctgatggaccaacttcatagagttgacattttccacctttaacttgtgtggtctgtaatgcaatagtgcggccgcagagtaccttttggtgcagcagtcaaaattgtgcggtccgcaattcgttccacacttaacctgatttatgggtactcttcctataaaacacactcattcctacaatactcttcaaatccaggtagcacaaaaataacacctatctacaaaataagaaaagaaaagaaagagaaacatgggtttcctcccaagaagtgcctgatttaatgtcgcgacacgatgcaaattaccatcatttgaaatgaatcactgccacaacgcgaccatcactaacctttcccaaatagtgcttcacccagtgaccattgactcaaaatacctcattatttttgttcttaaagtccaatgcaccaaaagggatcacacccacaatttcaaatggaccactctatttagatttcagctttccgggaaacatcctcaatcgagaattgaacaacaaaacaagatcgcccaccttgaactctttgttatacatgtatttttcatgaaggtacttcatgttctctttgtacaaggacgaacttgcataggcatggtaccagaactcatccaattcattcaaacgtgcaaccctcaagttagcggctgcatcacaatcaagattcaatttctttaaagcccacatggctttgtgctcaagttccaccggaagatgataggattttccggacactaaccggtaaggagacatttcgataggtgtcttaaaagtagtccaataagccataatgcatcatcaagtttctttgaccaatctattcggttagcattcactgttttggacaagatactttttatctcccggttggagacttccacttgactactagcttgtggacgatagggagtcgtaactttatgagtgacaccatacttgctaagcaaagtatcaaaagccttgttgcaaaaatacaaaaccccattgcttatgatagcccgcggagtaccaaaccttgtgaaaatattcttcttcaagaacaccaccacacttcttgcatcattgttggatagagcaatggcctcaacccatttagacacataatcaaccgcgaccaagatgtaggtgttttcacaagaactcacaaaaggacccatgaagtcaataccnnnnnnnnnnnnnnnnnnnnnnnnnnnnnnnnnnnnnnnnnnnnnnnnnnnnnnnnnnnnnnnnnnnnnnnnnnnnnnnnnnnnnnnnnnnnnnnnnnnnnnnnnnnnnnnnnnnnnnnnnnnnnnnnnnnnnnnnnnnnnnnnnnnnnnnnnnnnnnnnnnnnnnnnnnnnnnnnnnnnnnnnnnnnnnnnnnnnnnnnnnnnnnnnnnnnnnnnnnnnnnnnnnnnnnnnnnnnnnnnnnnnnnnnnnnnnnnnnnnnnnnnnnnnnnnnnnnnnnnnnnnnnnnnnnnnnnnnnnnnnnnnnnnnnnnnnnnnnnnnnnnnnnnnnnnnnnnnnnnnnnnnnnnnnnnnnnnnnnnnnnnnnnnnnnnnnnnnnnnnnnnnnnnnnnnnnnnnnnnnnnnnnnnnnnnnnnnnnnnnnnnnnnnnnnnnnnnnnnnnnnnnnnnnnnnnnnnnnnnnnnnnnnnnnnnnnnnnnnnnnnnnnnnnnnnnnnnnnnnnnnnnnnnnnnnnnnnnnnnnnnnnnnnnnnnnnnnnnnnnnnnnnnnnnnnnnnnnnnnnnnnnnnnnnnnnnnnnnnnnnnnnnnnnnnnnnnnnnnnnnnnnnnnnnnnnnnnnnnnnnnnnnnnnnnnnnnnnnnnnnnnnnnnnnnnnnnnnnnnnnnnnnnnnnnnnnnnnnnnnnnnnnnnnnnnnnnnnnnnnnnnnnnnnnnnnnnnnnnnnnnnnnnnnnnnnnnnnnnnnnnnnnnnnnnnnnnnnnnnnnnnnnnnnnnnnnnnnnnnnnnnnnnnnnnnnnnnnnnnnnnnnnnnnnnnnnnnnnnnnnnnnnnnnnnnnnnnnnnnnnnnnnnnnnnnnnnnnnnnnnnnnnnnnnnnnnnnnnnnnnnnnnnnnnnnnnnnnnnnnnnnnnnnnnnnnnnnnnnnnnnnnnnnnnnnnnnnnnnnnnnnnnnnnnnnnnnnnnnnnnnnnnnnnnnnnnnnnnnnnnnnnnnnnnnnnnnnnnnnnnnnnnnnnnnnnnnnnnnnnnnnnnnnnnnnnnnnnnnnnnnnnnnnnnnnnnnnnnnnnnnnnnnnnnnnnnnnnnnnnnnnnnnnnnnnnnnnnnatcaaagatatcaatctccaaaatagtattgagaggcatttcgttcttcttcgagattccaccggcctattgacattcatcacatcttttcaccacctcacttgcatctttgtaaagaattttccaatagaaaccgcaacttagcactttggccgccattcctgatccaccatggtgaccaccataaagcgaataatggcaagccccaagaatataactttgatcttcttccgataaacatgttctaattaccccatccatgcaaatacgaaaaaggtatgactcatcccaataataatcttgacaatctcgcttgatcttgtttctttgatttgaagagaactcatccgggatgattccacacatagggaagtttgctagatcctcgaaccatgtcacctccttcattgaaatagccaagagttgctcatcagggaaaaagtcattgatttcaaggccatcatgcggccttccctcctcctccaaacgagacaagtggtccgccacttgattttcactcccttttcaatcttggatgtcaatatcaaactcttgaaactatagcacctatctcatcaaccgagtttttgaatcattcttgctcataagatagcaatgttccgcatgatccgtatgaacaataacctttgcgcccatcaagtacaagcgaaacttctcaattgcaaacacaatggcaaggagatctttctctgtaacggtgtagttgacataggcaccattcatggtcttactagcatagtagactggatgaaaaatcttgttgatgcgttgccccaaaatagccccaaccgctatgtcactagcatcacacatgagctcaaaaaggatactccaattatgagcggtgataatgggagtggttgtcaacttgatctttagcaattcaaaatctctcatgcaatcataattgaagtgaaatttagcatgtttctctaagagctttcacaacgggttcaccactttagagaaatactttatgaagcgctggtaaaaccccgcgtgacctaagaaactttgcacgcctttcaccaaagtcggaggttgaagtttagaaaaattacctcaatcttagacttgtcgacttctatgccattctttgagatcttgtggccaaggacaatgccttcctcgaccatgaaatgacacatctcccaatttagcaccaagttcatttcttcacgccttgccaatattctatccaaatttgccaagaaatcatcaaaggaatccccgaccactgagaagtcatccatgaaaacttcaaggtaatcctttaccatgtccatgaagatcgccatcatacacctttgaaaagtcactggtgcattacatagaccaaatggcatccccttgaaggcaccatagggacatgtaaaagttattttctcttgattttccagagcaataaggatttggaggaagggaagtggaaaatgatccttccttgtgactttgtttagcttgctatagttcatacacactctccacccgatcaccgttcttgttggaatcaactcattcttgttattggtgaccaccgtcaggcccctttcattgggacacattgcaccggagaagtccacgaactatcaaaaatggggtagacaacctcgacatctaaccacttgataatctcctttttgacaacttcttgcatagcctcattgagtctcctttgatgttcaatagatggtttggagtcttcctccaagttgatcttgtgcatgcaaaatgcggggcttnnnnnnnnnnnnnnnnnnnnnnnnnnnnnnnnnnnnnnnnnnnnnnnnnnnnnnnnnnnnnnnnnnnnnnnnnnnnnnnnnnnnnnnnnnnnnnnnnnnnnnnnnnnnnnnnnnnnnnnnnnnnnnnnnnnnnnnnnnnnnnnnnnnnnnnnnnnnnnnnnnnnnnnnnnnnnnnnnnnnnnnnnnnnnnnnnnnnnnnnnnnnnnnnnnnnnnnnnnnnnnnnnnnnnnnnnnnnnnnnnnnnnnnnnnnnnnnnnnnnnnnnnnnnnnnnnnnnnnnnnnnnnnnnnnnnnnnnnnnnnnnnnnnnnnnnnnnnnnnnnnnnnnnnnnnnnnnnnnnnnnnnnnnnnnnnnnnnnnnnnnnnnnnnnnnnnnnnnnnnnnnnnnnnnnnnnnnnnnnnnnnnnnnnnnnnnnnnnnnnnnnnnnnnnnnnnnnnnnnnnnnnnnnnnnnnnnnnnnnnnnnnnnnnnnnnnnnnnnnnnnnnnnnnnnnnnnnnnnnnnnnnnnnnnnnnnnnnnnnnnnnnnnnnnnnnnnnnnnnnnnnnnnnnnnnnnnnnnnnnnnnnnnnnnnnnnnnnnnnnnnnnnnnnnnnnnnnnnnnnnnnnnnnnnnnnnnnnnnnnnnnnnnnnnnnnnnnnnnnnnnnnnnnnnnnnnnnnnnnnnnnnnnnnnnnnnnnnnnnnnnnnnnnnnnnnnnnnnnnnnnnnnnnnnnnnnnnnnnnnnnnnnnnnnnnnnnnnnnnnnnnnnnnnnnnnnnnnnnnnnnnnnnnnnnnnnnnnnnnnnnnnnnnnnnnnnnnnnnnnnnnnnnnnnnnnnnnnnnnnnnnnnnnnnnnnnnnnnnnnnnnnnnnnnnnnnnnnnnnnnnnnnnnnnnnnnnnnnnnnnnnnnnnnnnnnnnnnnnnnnnnnnnnnnnnnnnnnnnnnnnnnnnnnnnnnnnnnnnnnnnnnnnnnnnnnnnnnnnnnnnnnnnnnnnnnnnnnnnnnnnnnnnnnnnnnnnnnnnnnnnnnnnnnnnnnnnnnnnnnnnnnnnnnnnnnnnnnnnnnnnnnnnnnnnnnnnnnnnnnnnnnnnnnnnnnnnnnnnnnnnnnnnnnnnnnnnnnnnnnnnnccacgaatatctgccaatgtccatccaacagccttcctcctcttatgtagcactgccaatgtagagtcaacctgcacattagtcaaacaagaggaaagaataaccggtaaagtagaacaagggacaggaaattcataccgaacatgtggaggcaatggtttcaactccaaggttagaggctcttcaattgaaggttttgtaggaggtgttttcctattttcaagatccaaggaaagttttcggggtgcatagttgtacgaccccatccattgcaaagagttcacacattccataaagccatccatcccgtcattatcaaagttgagcaagacaacctccaatatatcaaccacattaatcgtggcacttctgtcatcaacaatcacatcggtcaccaggtccacgaaagaacacacttcattactatttggttgccgcatagatttacatacgtggaacaccacattttcatcacccacccgtaaagtgagttattcggcttccacatcaacaagagccttacccgtagcatggcaaggtgttccaagaataatcggcacctcacagtccacttcacaatcaagaatgacaaaatacgccggaagaatgaatttatcaacatgaaccaatacatcttcaatcactcccaatggtctcttcattgttcgatcggccatttgtaatctcatagatatgggtcttggttgcccaattcccaaagtcttgaaaaccgaatagggcatcaaattgatactttccccaagatcacaagggattttgaaagcaccgggatcttccaatataggagctattgaatgcacaattgcactcacttgatgagtgaccttgatagttttaaaattcatcgaccgtttctttgtcaccaaatccttcataaactttgcataaccggacatttgttccaaggcttcaactaatggaacattgattgagagactcttcatcatgtcaatgaactttttgaattgagtctcgccattttgcttggaaagcctttgaggatacagaggaggaggctttggcaatggtgccttagccttttgcactaccggttccggtatgtcaataacatgatccccagacgggttcacttcctcttgggtctcttccacattgtcatcaatatcaatccgcacttcatcatttgcttgcactatattgttcgtgatctcttcttcttgtaccacttgctcatcatccataaattgactttgacttgaggtgggtgcattcccaccttttctacttcttgtagtaacggccatggcatgccccgtgttgttcccaccctttgggttcaccactgtgtcacttggtagtgcctccttaggacgagaatttagagcttgagagattttccccatttgcacttctaagttgcagatcaatgtgttatgtgaggcaagttgggcatcagaattggtattcttctccatcatttgcttgaacatgttctgaatacatcccatttaattgttggaataattaggactatgggaaggataaggaggcgtgttgcttagttgttgatacatcgggggactttgagaacccgacccccgaccgccttggttgttacatccccaattgccttggttattgttgttatgtcaattcccttgattatttccaccactataatttccttgattgtttttattattccaattgcttcgattgtttccaccgctccaattgccttggttgtgagaattccaatttccttgattgttttgaggtcgccattgttgttgtcttgggccttggaagttgtttctttacccttgaaagttgttcacatattggacctcttcttcttggtcattataagagtcatattgatcaaacccactatcttcttgcaaacaattatccactctttgttgcacttgtggacccttcgttctccgtttgttcatcatcatgtttactctctccattgccttgacttgcctcgggttttgcactttttgaagtttagcctttgccaattggttcatggtagtggtcaatttggctatggcttgcccatagtcatgcaactctttgtgaatgtgaattacactgggatcaccttgtggaacattagcccgggattgccacacaggagaagtgttcgccatttcatccaaaatatcacacgcctccgtataaggcgtagtcatgaagttctcaccggcaagttgattcactacacattggttggttgtgttgatccccctatagaaaatttgttgaattatgttctccatcatatctttgttgggatactctttaaccattggtttatatcgttcccatatctcgtgtagtggttcattgggctcttgcttgaatgctagaatttcatcccgaagtatagccatttgctcgggagagaagtacttagaaataatgttctccgccagttcatcacaagtatgaatgaaatggtttggcaaacgttccaaccaatctaaagcttccccccgtagagagaagggaaaaagccttagcctcaaagtatcctcggagacatttgtttgtttactcccccaacacgtatccgtaaaccccttcaagtgtttgtatgcattttgacccgaagaaccggtgaaaacccatcgttgctcaagcaaggtgcacatcacgttggttatttgaaagttgaccgccctaatacggggaaggactattgcacttgcatatccttcattcggcaatactcggtgtggagccgctcatggtggaggtgagggtggagcgggcacattgtcataggacactcgacctcgtctattggcttgaggttcaagaggaacctcatccattttattatcctcaacgtccacatcccccaaagcaatatttctgagctcattgtttgccatggttgcacctacaatttcccaacatgttagtaacacaaaaggaaaagaagatattccaaaaacacactcaaatatatagctaacacaatttttgactcctcggtgacggtgccaaaatttgacctatcgcacacaatgcacacctcaatacaagatatgaatcggttgattgcaattatagtaacccaacaaagagtcgggatcgaatccacaaggagttatatgggagctaggagtatataatctagtgcgtgaatttgaactatcttaatttgcacttttacaaattggtgttgtttctatttctattttaaaactagagactgtcaactagaaggaataagactaggataattatttttttgttatcttttcaagtttgtaaaaagcctagggctattaccatcacctaggtgctcgcctaatgagatattaatcttaatgcttgttttgttgatcggggtgtattatagctatcaactctcaattacccattcaatacctctcgatcagagagtggttttgcccaatttggctttctcaagtcaaaatgcataatcacacaaaacggttgataatagctcaagtcgggttattactatctctaggttgaaccctttaattgggttgatcaatctctcaattgacccaatttcttgttagccaagttttcctagactaagtctttctttctcaagtagagactaaatcaaataggcatgaactaatggttgcaaccattaattccataaattaaagcatgaacgaggctaaataataaatacccaatcacaaacaagcactaaattagatacccataaggattaaacactagggttgggatacaaccctagtaaaaatctagctactcatgcttgaaatgaagaaatggaagaagaaatatcaattaaactcatattgtaaagttaaaatatttaaatctatagtaaaataccccaaaatatagaaaactttcaaaagaggccaagaaaaatggctaaaggacttgctgatgttaaaaattgacctaattttgtgaaagtcgtctatttctacaacgctagaaatttcagataaaattgtccttcaggaggttctgcggccgcacaattccatgtgcagtccgcagaattcttcatcttgcaggatctgggattctgcggccgcgaggcaatatttctgcggtctgtagatttatcaccgtggccgcaatttggtcttctgcggtccgcatctttacttctacgaccgcaatctggttttctgtggtccgcatatttacttttgcggccgtaaggcacttcttttgcgaccacacaattcttgtgcggtccgcaattttgagggtcttagactttggaaattttgcaaccctctaaagttgatctccagctcgtcatttgcggccgcacaattcctatgcggtccgcagttttctagaaagcatgatgggcttttcttcattatttgtggccgcatatggaattctgcagtccgcactttgtgagattttgtgccttttattgccttatgtttagattactcctttttgagtcgaatttcatcccgtgagtccaacttccaacattcctgcaattttgcacatttcattagtttcgggaacacaattcaacgcatttagacttaaaaaaaaagctaaaagatcttaataggtactcaaaatctccacttatcactatcatacttgggtttgaagaaaatgaagaagaaggattaattaaactcataataaaaaattaaaatagctaaatctatcgtaaattacaccaaagcaaagcaaacttccaaaaatggcaaagaaaaagggctacaatgtttacagaggttcaaacttcacctaatttcataaagctcttctatttatacaagtctgaaaatatcggacaaaaatgcccctcaggaggttttggggccgcacacttccatgtatggtccgcagacttcttcatctggaaggagctgggattctgcggccgcacaattgtgaactgcgaccgctgggcaacatttgtgcgatccacagatttagaactacagccgcaagtcactcttttgcggtccgcaatagtgcagcaaaacaattttcttcggtcgcacaaatcttgtgcggtccgcaattctctgaagctttggacttggtccttttgcaatctctctgatcttgacctttagcccattttttgcggcctcacaattcatgtgcggaccataatttggacaattgtctgctgcgttttccttctttgtttgcggccgcaggtggaattctgcggaccgcacattgtatgtttctatgccatttgttgccttgtacttggactactcctctttgagtcggatttcatctcgggagcccaacttccagcattcctgcaattttgcacaatttcattagttttgggaacacaattcaaagcttttgggctaaaacaaaatctaaaaggcactaataagcagtcaaaatccccacttatcaactcccccaaacttaagtatttgcttgtcctcaagcaaataaattagttcccacatctacaagttaagggtcatttcagcgagtcgaatgtgagccatccacacatcagttgggaccaacaattacccacactacctatgtattgtcaacaaggcgataagttaaccatttatgcacatatagttctaaagtgacatttgagcatcaaagattgactttagtcatctaggattctttctctatcatgtaggtcattgtggattctaaagtcttcctcctttacttttcggtttcctggttcacttaagaattttagcactcaatccaacgatttatgaaaggtccactcatctctctcaagagaatgtcacaagtacggcttcaagtaccataggcttgctcctcatgtagatcgccactaatgtaagatcactcagcttgagatcaaataggacttttttcgagatgtaatgaaggcttttggattagggttggatacaatctggttgagtggttccaccttccttaagcactccatcattcatttctcggctcacactttgccaattccttgatgcactttcttttccttgggggactagagatacttaacatcactctttcttgatcattacagtcatatttctccatgtttgggatcattgccttctttgaatcccttcaactcttctacttattcatttttttgcatttttcttcttttgaatttccttgcctctccctcaaacttatgtttttagccattttttcacatgagtattaaggaaagctcgggtgtcaagagagggtctcaatagaatgggtaaaggcttgtagcatgattttcaaatgagaaggctaaaggctcgaagaggttgactagggatgacatcattggtaggcaatagaaaactcaaacgggccaaggaaagcctacaatcacttctcaagccaagcaaaacttaggatttctccttaaaacacattcggggcaagttctagaccttttgcacgggtacttggactaacaccatagcaactcacctctcacgcaactggattgttaaagaggacagagttgagggcccacaacgaccatatttaagtttgaaaatcactatggttcaattaaaccattagatggttgccaaagtcaacacaagagtcacaaagtcactaactagagttatttctttcaaaaaccttatttttaaccataagcacgtagttaagtgtgttggtaccaaatgaagcacgattgactcttcgagcatgactcaannnnnnnnnnnnnnnnnnnnnnnnnnnnnnnnnnnnnnnnnnnnnnnnnnnnnnnnnnnnnnnnnnnnnnnnnnnnnnnnnnnnnnnnnnnnnnnnnnnnnnnnnnnnnnnnnnnnnnnnnnnnnnnnnnnnnnnnnnnnnnnnnnnnnnnnnnnnnnnnnnnnnnnnnnnnnnnnnnnnnnnnnnnnnnnnnnnnnnnnnnnnnnnnnnnnnnnnnnnnnnnnnnnnnnnnnnnnnnnnnnnnnnnnnnnnnnnnnnnnnnnnnnnnnnnnnnnnnnnnnnnnnnnnnnnnnnnnnnnnnnnnnnnnnnnnnnnnnnnnnnnnnnnnnnnnnnnnnnnnnnnnnnnnnnnnnnnnnnnnnnnnnnnnnnnnnnnnnnnnnnnnnnnnnnnnnnnnnnnnnnnnnnnnnnnnnnnnnnnnnnnnnnnnnnnnnnnnnnnnnnnnnnnnnnnnnnnnnnnnnnnnnnnnnnnnnnnnnnnnnnnnnnnnnnnnnnnnnnnnnnnnnnnnnnnnnnnnnnnnnnnnnnnnnnnnnnnnnnnnnnnnnnnnnnnnnnnnnnnnnnnnnnnnnnnnnnnnnnnnnnnnnnnnnnnnnnnnnnnnnnnnnnnnnnnnnnnnnnnnnnnnnnnnnnnnnnnnnnnnnnnnnnnnnnnnnnnnnnnnnnnnnnnnnnnnnnnnnnnnnnnnnnnnnnnnnnnnnnnnnnnnnnnnnnnnnnnnnnnnnnnncataaaacgaacccattcccttaagaaggttgtcatgcaatcctccattgggacgagtcacccggttcacacaataactacctttggaaagaaccgtggcattaagaaaatcaaagtcttattatctactgaaatataaaaagaagctaccaaataaaaaaagctactaattcaaaaagaagctactaaattaaacactaactaataagaaaacaaacataaagaagctacaaagcaaaaattgtcgaaagcataacgaatatacataatgagggagaaagagaagatatatacataatgagagaagaagaggaaaatagtatcaagttattacaagacaaatgtctcagaatcatcaaataagatcaaataaactccaacctccctctcctccaaatagaaaaataagcattgtccccaatgcttagcaaaataagagtaaaggaagggaaagagtgaagaaaactccctttggatcattggacacatctgtgtccacagaaacatcaccaccctcagtctcatctaactggatctcatcaacctcagctctgggtgggactgggttagtgaacatctgacacactgcctcggcagtgtcagcatcaaagtctggctcctcagactggccagctgtgccaacggtgttgcaggatctgggcctgaagggtgtgggtcaatcagcatgtcaaacagaatatctccagctacatcaaccttggtcacctgccttcggagcttgtccaccgactttttactggcctagaactttctcatcttctttacttctttgcccttctcttcgatcactgacatgtgatgtactaaggtagccatgattgtgttctagttctctaggagcttcttcaatgagatgcctgaatagaagaatgtgctgcaatagtactggataagtctgacaactttgtagtggctatctgcatccagttgttaaggctcgccaatgtgtaggagactcgcaacggagaaagttgagcagtaggtatgggcaccggcttcaaagctgaagtggaacctgtaacaggaactgtagtgggaatataagatggtggtggaggcatagctgtgacactagatgaaggctcgaccgaagtggatggaacattaacttcctctgcaactaccaccgatggcccatcagtttagggtaggacgtgtcagcttgctgagtgatcacagatatgttgaccgacatcacgacacctacattgatagggtacccagccatgatagaagcatctagaatagcccgagggatcagaagataggtctcattctggcacgggtctagtctgctatagacaaaggtttgccacccttttgcctcaaagctcaaagtgttcccgtgaatagaaacccccgctgtgatccatggtggtggtggcccaaggactactagaatctctgctagccaagggagagcttcatccctaagaacacatttatctaagtactatgtgggctcgacatcatcaaatcccaagtatgtgtttaatgtgtgctgatcaaattgcactttgaggtttctcactttcgtcaccgttatcccatttttgatatgcgccacatttgcgtagaattcccggacaaggtactctttagcatccaccacgctctaggtaaaccacatcctccctttgcgttctctaaattgtctcaatacttccgggttattcctctccagatctttcaactgaaactgtcacgcaagagtgagcaacctcactggccatcattcagggaagctagagaaagcatccaagctaataaaccggtcctcccatacctctttcttcctcgaccattcaaggctggcaactgcagcatctccccctctgtcatcaacggggatgccctgaactgatgtatcggtgcctcagtgacaggtgtattggatgtctcagaagtatgactagcacttttcgatcccttggaagtgctatgagatgaggacgactcgtccctgagttgatacctccttagcgaccatgactgaacggccggctgctcttgtacagaggaagagttgccctttgattcttccctaaatgggacataagtgctggtctcagaaaggtctgcacctctccctctgccggttgtaagtttctttgtgattgtcttttgtaggccgatgggtaaagcactcttgcctcgaaccctgaaagatacacctcttcctttcgaagtgtcgcctctatctctaaatcataccattttctgtaccaagcaaaggcaattattagttgcaattcaagctcagacatacactgagttatgtaaggacacaccagaagacacagtgaggaatacagttggaatatgcttgcaggatagggatctatggttcgtacatttatcattgcggccgcagattgggacttgcagatcgcacaattctctcttgtggccgcagatgtgaagtgcagaccgcatagtttttcttgtagccacacattgaagcacaaatattacacttctctgaagatagtaaaatagatattttgcggccgcaatggaaattcctagagttttacacttctctgaagacagggatctgcggtccgcacaattttccttgcggacacagacctattcattcctagagttaccctagactctacttctgtggaccgcacaatttcttgtgcggccgcatcaagcaattatgaacaggtcagtaatgttatcttgggcttgcaatttttgcacaatttttaacatggaaacaacgtacaagcatgaaaatctattgacccagttcccatagagcatgtactagttgaccactacagatttacccccacatggttgtacaatttatttctactaacaaaaggcctaaactaattaannnnnnnnnnnnnnnnnnnnnnnnnnnnnnnnnnnnnnnnnnnnnnnnnnnnnnnnnnnnnnnnnnnnnnnnnnnnnnnnnnnnnnnnnnnnnnnnnnnnnnnnnnnnnnnnnnnnnnnnnnnnnnnnnnnnnnnnnnnnnnnnnnnnnnnnnnnnnnnnnnnnnnnnnnnnnnnnnnnnnnnnnnnnnnnnnnnnnnnnnnnnnnnnnnnnnnnnnnnnnnnnnnnnnnnnnnnnnnnnnnnnnnnnnnnnnnnnnnnnnnnnnnnnnnnnnnnnnnnnnnnnnnnnnnnnnnnnnnnnnnnnnnnnnnnnnnnnnnnnnnnnnnnnnnnnnnnnnnnnnnnnnnnnnnnnnnnnnnnnnnnnnnnnnnnnnnnnnnnnnnnnnnnnnnnnnnnnnnnnnnnnnnnnnnnnnnnnnnnnnnnnnnnnnnnnnnnnnnnnnnnnnnnnnnnnnnnnnnnnnnnnnnnnnnnnnnnnnnnnnnnnnnnnnnnnnnnnnnnnnnnnnnnnnnnnnnnnnnnnnnnnnnnnnnnnnnnnnnnnnnnnnnnnnnnnnnnnnnnnnnnnnnnnnnnnnnnnnnnnnnnnnnnnnnnnnnnnnnnnnnnnnnnnnnnnnnnnnnnnnnnnnnnnnnnnnnnnnnnnnnnnnnnnnnnnnnnnnnnnnnnnnnnnnnnnnnnnnnnaatactataaattaaactaaaaattgaaaaattctaacaagtaattaaagcataccagatatgagtgagtgcaagaaatgggtgttcaacaattgccaggcgtgtgggcagatgatttaccaagaggattcaaattggtgcaagttttgtgctcagagagagaaaagggtaacagtagccctagccctcttatttatatgcttgaagttcagaaggggaaaaggtgtgagtgcggcagcagaattccagttacagactgcactctgttacctggtgagattaaacctttgttttgtctgcggtccgcaaaacctttgtgtgcggccgcagatccttgttgcggaccgcaaattttgtgttgccgcggtagatcggccatttttctgacaggccaacttcagagagctatcattttccaccttcaatttgtgcggtccgcaagttaattgtgtggctgcagagtaccttttgttgtagcaaccataattgtggagtccgcacaatgcaactgcagtccgcaattctttcacacttaaccgaatttctggccacaattcctgtaaaacacactcatccctgtagcacacttcaaatcaagtaagcgcaaaaataaacataactacaaaagaaacaaagaaaagaaaaagaaacatgggttgcctcccaagaaagggcatgatttaatgtcgcgacacaacgcagagtaccttcagttgaaacgaatcaccgccacgaagtggctatttccaacttttcccaaatagtgcttcactcgatgtccattgactcagaatacttcattgtttttgttcttcaagtccaatgcaccaaaaggtgtcacacccacaatttcaaaaggaccactccatttagactttagttttccgggaaacatccttaacctcgagttgaacaacaatacgagatcacccatcatgaactcattgttccaaatgtatttgtcatgaagatatttcatcttttctttgtacaaggacgaactttcataggcatgataccggaactcatcaaattcattcaaatgtgcaaccctcaagttagcggctacatcccaatcaagattcaacttctttagagcccacatggctttctgctcacgttccaccggaagatgacaagcttttccgaacaccaatcggtatggagacattccgataggtattttgtaagccatccgataagccataatgcatcatcaagcttcttggaccaatccgttcggttagcattcactgttttggacaaaatactttttatttcctagttggagacttccacttgatcgcttgtttgtggatgataaggattcgtgactttatgagtaacacaatacttactaagtaaagtgtcgaaagccttgttgcaaaaatgcaacccctcatcgttatgatagccctcagagtaccaaaccttgtgaaaatactcttcttcaagaacaccaccacacttctcgcctcattgttgggtagagcaatggccttaacccatttagacacataatcaatcgcaaccaagatgtaggtgtttccataagaactgacaaaaggacccatgaagtcaataccctacacatcaaagatatcaatttccaaaatgatagtgagaggcatttcatttttcttcgagattccacaggccctttaacattcatcacatcatttcactaaatcacttgcatccttttaaagagacgggccaatagaaactacaacttcacactttggtcgacgttcttgctccaccatggtgaccaccatatggcgaaaaatgacaagccccaagaatttcaccttgctcttcttccagtacacatcttctaatcaacccatccgtgcaaattcggaaaaggtatggttcatcccaataataatcttgacaatcccgtttgagcttcttcctttggtttgaagagaactcatccgggatgattccacacacaaggaaattcctagatccacaaaccatggaacctccttcattgaaatagccaagagttgctcatcgaggaaggagtcattgatttcaaggccatcatgcggcctcccctcctcctccaaacgagacaagtggttcgccacttggttttcactcctttttctatcttggatatcaatatcaaactcttgcaacaacatcacgcatctcatcaaccgatctttggaatctttcttactcatatgataacgaagtgccgcatgatccatgtggtcaataacctttgcacccatcaagtacaggcgggacttctcaattgcaaatacaatggcaagaatctatttttccgtaatagtatagttgacttgggcatcattcattgtcttactagcatagtataccggatgaaaaatgtaaggcctcgtaaacattttctaatgatttaagattttaaagtgcgccaacggtatttgggaataatgtatttgagtattaaagaagacctatgtgatagagccacaacattttgaattgataatgtatgtttaaggagtgttggaatatactaaggagttttgtgaatggaaagaacttgcgtggaacaagttggatacattaagtggaaaggattttttaactggcataagatccgacttcaaatgattataactccctcaatataatggctaaggtgttgatctacctataaaattaaagccctttgagtctcatttccaacgcatcaaaccgtttgccatttggatatttctacagaacgttgtggctattttactagacctatgtcatatgcacgcccagatgcgcgaccacgcatatttgggagtttctgccttgtgtgcacgtccagatgcatggccacttgcccaggtgcgcggctgcgcacgtaggagcccattaaataacccaaagaatgggtagagagaggggctaagtcatttcttcaagactagggctttctctccatcacccatccggccaaggcttccaatacactcctaaggtgagtttttaagtgtgtttttatgattatttcacttctcaatcactagttacaccaaggttttgattgaattccatagaatttcttcaaaatctcaagaataccccaaaagttatttttcaaaatttggtctacaagaggtatgtccaccatctctaactaatctatggtgattatttatgtatgaattatgtgttaggacttatgggatggttggaggccacaaatgcctaacctaggttgtgttggtactgtagagattgtaaaatgaattaattgataagatttatgggttgggagtgaattgttgggcatgcatgcatgtgctagagacggttgtaaggtgaatcattggtgtggaaggtggttgttaggtgaagaaatttccattggaggaggttgtagaaagatatgcacactaaatgtttaataaaaagtctaaatgacttaaagtatagaaatcttgctaatgatggtgcaattgtgttgcattgttgtagattgaagttgtttagtatggtggaacatcgtagtattattaaggggcgaattccaggtatgttggctaaactactcttttagaaatgaatttcatgatcttcccgttagtttcaagtattgttggctcaagttcaaaattcccatgttccgagttgttcctaataaattcgattatccagagtaagcaaagtgtcgagaattatgtatataaaatgtattccgaatgttcctagcacattatgttatccttcgggaatatgttcaagtataatatgtgtattaaaatgttatggctttgagtagtgtttcaaatgaaagttatcatgccaaattgtgggagaaaaactcgatgtgcttaagacccttaattgctcatatgtgtacctaaagtcttgattgaaaatgacttgttgttgataatgtataaagatgctcgaaagtgaaagaagtgagttggtgttagaaattgtggccaccgtgccaagaatgaaagttatacttgtggccaatggtgccaatgcaatgatatgatgtgagaaaagttatgaaatgagccttgatttaactattccgaattgacttcgaaaatagatttgcctaaaagcttatgtactcaagtcatgccaaaatgtggctattttatctaatgctatgctttgtaagtatttccaatatgttttgaactcttatatattcaggagttgaaatggtgtactgccctttttggggaaaagtatttcaagaataaatgatgtgttacttgtttatgatttttaaacttgtgcttcgattgccaatcattttactccattttcttgaaaagaaatccattgtgtttaaagccttcattactaaagaacctaaagttgtgatttccaaaatattctatttgttgataattatgatgatgatccatgaaagggaagaaatgaaagtgtggaatatgaaatacggccattatgccatgaaagaagaatcatatgcatggacaaaatagccaataaaataatgatgttgtaagtggttgaaagtatcaatgaggctatatacggtatgaaaacttatgaggtaaatatatttgtattgttgtttcctttgtatgcaaatcaaaaaaatatttttttggagcatcgttagtcaccgagaaagggtatgtaacaacctaaccccgaaactacacgtgccggtgtaggagtgattgatgggtaaatccccatattgatatgattaaattattccccttaaattgggatgatattgatgtgatgatattattccccttatttgggatgagattgatgtgataaaattattccccttaattgggatgggatgattgatagaaaaggatgatgtcgatccacacgacattgtnnnnnnnnnnnnnnnnnnnnnnnnnnnnnnnnnnnnnnnnnnnnnnnnnnnnnnnnnnnnnnnnnnnnnnnnnnnnnnnnnnnnnnnnnnnnnnnnnnnnnnnnnnnnnnnnnnnnnnnnnnnnnnnnnnnnnnnnnnnnnnnnnnnnnnnnnnnnnnnnnnnnnnnnnnnnnnnnnnnnnnnnnnnnnnnnnnnnnnnnnnnnnnnnnnnnnnnnnnnnnnnnnnnnnnnnnnnnnnnnnnnnnnnnnnnnnnnnnnnnnnnnnnnnnnnnnnnnnnnnnnnnnnnnnnnnnnnnnnnnnnnnnnnnnnnnnnnnnnnnnnnnnnnnnnnnnnnnnnnnnnnnnnnnnnnnnnnnnnnnnnnnnnnnnnnnnnnnnnnnnnnnnnnnnnnnnnnnnnnnnnnnnnnnnnnnnnnnnnnnnnnnnnnnnnnnnnnnnnnnnnnnnnnnnnnnnnnnnnnnnnnnnnnnnnnnnnnnnnnnnnnnnnnnnnnnnnnnnnnnnnnnnnnnnnnnnnnnnnnnnnnnnnnnnnnnnnnnnnnnnnnnnnnnnnnnnnnnnnnnnnnnnnnnnnnnnnnnnnnnnnnnnnnnnnnnnnnnnnnnnnnnnnnnnnnnnnnnnnnnnnnnnnnnnnnnnnnnnnnnnnnnnnnnnnnnnnnnnnnnnnnnnnnnnnnnnnnnnnnnnnnnnnnnnnnnnnnnnnnnnnnnnnnnnnnnnnnnnnnnnnnnnnnnnnnnnnnnnnnnnnnnnnnnnnnnnnnnnnnnnnnnnnnnnnnnnnnnnnnnnnnnnnnnnnnnnnnnnnnnnnnnnnnnnnnnnnnnnnnnnnnnnnnnnnnnnnnnnnnnnnnnnnnnnnnnnnnnnnnnnnnnnnnnnnnnnnnnnnnnnnnnnnnnnnnnnnnnnnnnnnnnnnnnnnntagccgattgggtcgtaatcggacaccatgctgcacatatggtggtgatagtgctggaaattttaattgaaactgtgattgtggttgatgtctcggctgagacagcctagccgatcgggtcgtgatcgaagaccatgcttcacacatggtggtgattgtgctggaaattgtaattgaaattgtgattgtggttgatgtctctaatgaggtggcctagccgatcgggtcatgatcgaaattcgtgctaaatgtacgatggtattggtattgagagtgatggtggttgatgtctctaatgagatagcctagccaatcgggtcgtgatcggactccgtgctaaaagtacggtggtattggtattgtgtgtattggtattgtgaacggtgatattgtgaacagtggttatcggtgctaaagacctcccaaccaaaaagaatattatcttcgtaattttgaaattattatgttttaacttggcatttggatattattgattgtgacttgttgtttctattaatttccctttcttatagtggcattctattttgaaagaggacagttagctttacatactagtactattccatatgtactaacgtccatttttgccaggggcgctgcatcttcaatggatgcaggtggttcatcaacgagcagctttggtcctcgttagcagccactctctattcagtaggttttggtgagccatactctattccgggcccgatgtcatttgagttgtacattgtcctttaaggtatagccggggccttgttgtcggcacttccatactactcttctgttgtacttagaggctacgtagacaagttgtgggtggtgtttgatatgggaaattgaactaaaagtattggtatttggcaaacatgtttttcattaaatctataaatttgtaaaaatttgaaaattatgaatgaagctgctaatgggaatgtaatgggagttgttaatgaaatctttttagtgcttgattaattgagtgcatctcctctttattcatggatgagttggggtagaagaaaatctaacatgcttgctcggttgggttcactcggttgagcgccggtcgcgctccccgagtttggggcgtgacaaaaaatcttgttgatgtgttgccccaaaacagccccaaccactacgtcactagcatcacacataagctcaaaggggacactccaattttgagcggtgatgatgggagtggttgtcaacttgaactttaacaattcaaaggctctcacgcaatcatcattgaagttaaacttcacatatttctctagaatcttgcacaacgggttcaccacattagagaaatctttgatgaaacgccggtaaaacctcgcgtggcctaagaaactccgcacacctttcaccgaagttggaggtagaagtttagaaataaccttaatctttgccttgtcaacttcaattccattttttgagattttgtggccaaggacaatgctttcctcgaccatgaaatgacacttctcccaattgagcaccaaattcgttgcttcatatcttgccaacactttatctaaatttggaagacaatcattaaactaatccccaaccaccgagaagtcatccatgaaaacttcaaggaagtcctctaccatgtccgtggtgatagccatcatacacctttgaaaagtcgtcggtgcattacacaaaccacatggcatccgcttgaaggttaaagtaccatagggacatgtaaaggttgttttctcttgatactccggagcaataaggatttggttgtagaccgcatacccatcaagaaagaaatagaaagcacggccgaccaacctatcaagcatttggtctaggaagggaagtggaaaatgatccttccttgtgactttgttgagcttatggtagtccaaacacactctccaaccgattaccattcttgtaggaatcaacccattcttgtcattggtgagcaccgtcatgccccccttctttgggacacattgaaccggagtagtccatgaactatcggaaatgaggtagacaaccccggcatccaaccacttataatctcctttttgacaacttcctgcatagcctcatttagtctcctttgatgttcagtagatggtttgtcacattcctccaagttgatcttatgcatgtaaaatgcggggcttatcccccgaatatccgccaatgtccatctaatagtcttctttctcttatgtagcactgccaatgtagaatctacctgcacgttagtcaaacaagaggaaagaataactggtaaaataaaaacaagggccaagaaattcataccgaagatgtggaggcaacggcttcaactccaaggttggaggctcttcaatgaaaggctttgtaggaggagttttcctatttttgagatccaaggatagtttccggggtgcataattatatgaccccattccttgcaaagagttcacacattccatgaagccatcgatcttgtcatcatcaaagttgagcaatacaacctccaacatatgtccaacattgattgtggcatttgtatcatcaacaataacaacggtcactaagaccacaaaagaacacaccccgcatagacttgcagacatggaatatcactttttcatcacccacctagaaagtgagttctccaacttccacatcacaaagagccttccccgtagcaaggaaaggtcttccaagaataatcggcaccttataatccacttcacaatcaagaatgacaaaatctgccggaaggatgaatttatcaacacgaaccaagacatcttcaatcactcccaaaggtctcttcattgtacgatcgtccatttgcaatctcatagaggtgggtattggttgcccaattaccaaggtcttgaaaatcgaatatggcattaaattgatacttgccccaagatcacaaagagctatagcaaactcggcgcttccaattgtataaggaattgtgaaagcacatggatcttccaatttatggccattgattgcacaattgcactcacttgataagtgaccttgatagtttcaaaattcattgaccaattcattatcacaagatccttcatgaactttgcataaccgggtatttgttccaacgtttcaactaatggcacattgattgagagactcttcatcatttgaatgaactttttaaattgattcttgccattttgtttggcaagtccttgaggatatggaggtggaggcttaggcagtggtgccttagccttttgcactaccagttccggtatgtcaataacgtgatccctagacgggttcaccttctcttgagtctcttccacactatcattaatatcaatctgaacttcatcatttgtttgcaccacattgttcgggacctcttcttcttgtaccacttgctcatcatccacaagttgcctttgacttgaggtgggtgcattcccacctcttccannnnnnnnnnnnnnnnnnnnnnnnnnnnnnnnnnnnnnnnnnnnnnnnnnnnnnnnnnnnnnnnnnnnnnnnnnnnnnnnnnnnnnnnnnnnnnnnnnnnnnnnnnnnnnnnnnnnnnnnnnnnnnnnnnnnnnnnnnnnnnnnnnnnnnnnnnnnnnnnnnnnnnnnnnnnnnnnnnnnnnnnnnnnnnnnnnnnnnnnnnnnnnnnnnnnnnnnnnnnnnnnnnnnnnnnnnnnnnnnnnnnnnnnnnnnnnnnnnnnnnnnnnnnnnnnnnnnnnnnnnnnnnnnnnnnnnnnnnnnnnnnnnnnnnnnnnnnnnnnnnnnnnnnnnnnnnnnnnnnnnnnnnnnnnnnnnnnnnnnnnnnnnnnnnnnnnnnnnnnnnnnnnnnnnnnnnnnnnnnnnnnnnnnnnnnnnnnnnnnnnnnnnnnnnnnnnnnnnnnnnnnnnnnnnnnnnnnnnnnnnnnnnnnnnnnnnnnnnnnnnnnnnnnnnnnnnnnnnnnnnnnnnnnnnnnnnnnnnnnnnnnnnnnnnnnnnnnnnnnnnnnnnnnnnnnnnnnnnnnnnnnnnnnnnnnnnnnnnnnnnnnnnnnnnnnnnnnnnnnnnnnnnnnnnnnnnnnnnnnnnnnnnnnnnnnnnnnnnnnnnnnnnnnnnnnnnnnnnnnnnnnnnnnnnnnnnnnnnnnnnnnnnnnnnnnnnnnnnnnnnnnnnnnnnnnnnnnnnnnnnnnnnnnnnnnnnnnnnnnnnnnnnnnnnnnnnnnnnnnnnnnnnnnnnnnnnnnnnnnnnnnnnnnnnnnnnnnnnnnnnnnnnnnnnnnnnnnnnnnnnnnnnnnnnnnnnnnnnnnnnnnnnnnnnnnnnnnnnnnnnnnnnnnnnnnnnnnnnnnnnnnnnnnnnnnnnnnnnnnnnnnnnnnnnnnnnnnnnnnnnnnnnnnnnnnnnnnnnnnnnnnnnnnnnnnnnnnnnnnnnnnnnnnnnnnnnnnnnnnnnnnnnnnnnnnnnnnnnnnnnnnnnnnnnnnnnnnnnnnnnnnnnnnnnnnnnnnnnnnnnnnnncgtaacggccatggcatgccccgtgtcattcccaccctttgggttcaccatcttgtcacttggtagtgccccttaggacgagaattgagagcttgggagatttgcctcatttacacttttaagtttcgaatcgatgtgttgtgtgagtcaagttgggcatcctaatcggcattcttttccatcattttcttgaacatattctcaatacgccccatctcattggttgaagaactatgaccatgggaatgataagtaggcgggttgttcggttgttgatacatcgggggcttttgaaaacccgaccctcgattgacttgattatggttccatgagtgtctactaaaattaagatagtgaattaaataatcaaaacccatgagtgtctactaaaattcccaaaaccctgtgtcacaagtgcacacgcatctagtagaatatacaaaactctctaagagctactgtctgaaagaaaatataccaaaatgataaaacataataagaaaaggctccgggtgtttcagaatggagcatgagaagaagctcaccactaagcctccgggtaatgcgaatatatgcccggacgaactccagatgcacctacctcagaacctgcacatttttgtgcagaactatagtgtgagtatgtaaacaatgtgtacccagtaagtatctagtctaacctcaaaaaagtagtgatgaggggccgacatcgacacttactagagggcaatatatataatgtacaaggatatttaataggcatgaaatacaacattagtaatggaatcaaatataacatgctaatcgcaacaagtaaggactcaacatgtatttataaatcctcgaatcataaaagacatatgaagtataatcggactccgagtgacaatacgtacgagttatgccgaggtcgtatggctcgatccataataatcgtgcacgtacactaccgaggtcgtatggcccgatccgtggatgcatcccttatatatatatatatatatatatatatatatatatatatatatatatatatatatatatatatatatatatatannnnnnnnnnnnnnnnnnnnnnnnnnnnnnnnnnnnnnnnnnnnnnnnnnnnnnnnnnnnnnnnnnnnnnnnnnnnnnnnnnnnnnnnnnnnnnnnnnnnnnnnnnnnnnnnnnnnnnnnnnnnnnnnnnnnnnnnnnnnnnnnnnnnnnnnnnnnnnnnnnnnnnnnnnnnnnnnnnnnnnnnnnnnnnnnnnnnnnnnnnnnnnnnnnnnnnnnnnnnnnnnnnnnnnnnnnnnnnnnnnnnnnnnnnnnnnnnnnnnnnnnnnnnnnnnnnnnnnnnnnnnnnnnnnnnnnnnnnnnnnnnnnnnnnnnnnnnnnnnnnnnnnnnnnnnnnnnnnnnnnnnnnnnnnnnnnnnnnnnnnnnnnnnnnnnnnnnnnnnnnnnnnnnnnnnnnnnnnnnnnnnnnnnnnnnnnnnnnnnnnnnnnnnnnnnnnnnnnnnnnnnnnnnnnnnnnnnnnnnnnnnnnnnnnnnnnnnnnnnnnnnnnnnnnnnnnnnnnnnnnnnnnnnnnnnnnnnnnnnnnnnnnnnnnnnnnnnnnnnnnnnnnnnnnnnnnnnnnnnnnnnnnnnnnnnnnnnnnnnnnnnnnnnnnnnnnnnnnnnnnnnnnnnnnnnnnnnnnnnnnnnnnnnnnnnnnnnnnnnnnnnnnnnnnnnnnnnnnnnnnnnnnnnnnnnnnnnnnnnnnnnnnnnnnnnnnnnnnnnnnnnnnnnnnnnnnnnnnnnnnnnnnnnnnnnnnnnnnnnnnnnnnnnnnnnnnnnnnnnnnnnnnnnnnnnnnnnnnnnnnnnnnnnnnnnnnnnnnnnnnnnnnnnnnnnnnnnnnnnnnnnnnnnnnnnnnnnnnnnnnnnnnnnnnnnnnnnnnnnnnnnnnnnnnnnnnnnnnnnnnnnnnnnnnnnnnnnnnnnnnnnnnnnnnnnnnnnnnnnnnnnnnnnnnnnnnnnnnnnnnnnnnnnnnnnnnnnnnnnnnnnnnnnnnnnnnnnnnnnnnnnnnnnnnnnnnnnnnnnnnnnnnnnnnnnnnnnnnnnnnnnnnnnnnnnnnnnnnnnnnnnnnnnnnnnnnnnnnnnnnnnnnnnnnnnnnnnnnnnnnnnnnnnnnnnnnnnnnnnnnnnnnnnnnnnnnnnnnnnnnnnnnnnnnnnnnnnnnnnnnnnnnnnnnnnnnnnnnnnnnnnnnnnnnnnnnnnnnnnnnnnnnnnnnnnnnnnnnnnnnnnnnnnnnnnnnnnnnnnnnnnnnnnnnnnnnnnnnnnnnnnnnnnnnnnnnnnnnnnnnnnnnnnnnnnnnnnnnnnnnnnnnnnnnnnnnnnnnnnnnnnnnnnnnnnnnnnnnnnnnnnnnnnnnnnnnnnnnnnnnnnnnnnnnnnnnnnnnnnnnnnngaggggccgacatcgacacttactagtgggcaatatacataatgtacaaggatatttaataggcatgaaatacaatattagtaatggaatcaaatataacatgctaatatcaacaagtaaggactcaacatgtatttataaatcctcaaatcataaaagacatatcaagtataatcggactccgagtgacaacacgcacgagttatgctgaggtcgtacaacccgatccatatatatatatatatatgtatatgtatataatttccatcaataattaaacattccccaatctctaagtaatgaagattgatttaacataatctttaaccaagttgttttcttattaatacaagcaattaaactagagggttaagttcaaatagtgcaagtaatagcatgataaatgcctatgtctaccggaacataagatgaatttagctatgcacggacagtagcaaataacaatttaaacacctatggggttaatttcctcttacaaggttatgctagagacttacctcgttcccaagtccatttttcggtccacaattcactctaaaagcctcaagtcggtgccgaacaatctgaaactagctaaaggttgtgcaaactaatcaataattgctcaaaggtttataatttaactattagagtgattactcaacacaattttgaaggttcccaaaattcacctccgaacccacgtgcccggattccgtatatgttcgtaaataaatgttactcataaccttacgaacacaaatatataatttttacccaatctcgtaatcatttacgttgtcaaatctcatttttatcaaaatctaggtttttcaacaaactccaaaaattttcacattattcatgttaagatctactcgtaatctaggtattaaactcacattgtgtagaatacacttacctcaagatgctagataaaaatccctctttcaaaagctccaaaatcggctaataaatgagagaaatgaaaaaaatggcaaaaatcccaatttttattaagtcactgcccaagtctgacctcttagcgatcgcgaaggcaaaagtcacgcacccaggaaaactcccctacactattgcgagaagccactcacaaacacgatgcactgagccgcccactcatgatgaatgtgtgcctgcattcctgaacgcaaaaggaaaaggagtcgcttaggcccaggcccaggccttctacgcgaacgtgatgagtcaccctcgaacaagaaggccactggttctaagcctccgcgaacgcggccctttcttcgcgaacgcgaagagcaaaaacgtccagtacccaaatccttcatcgcaaacgctatgggcctttcgcttttgcgaagaaggaagccagaactagcacaccagtagttttggaattcgctccgggtagtccaaaacacacccatgcccctcgggaccccgtccaaatgtaccaacaagtctataatcataatacggacctgctcacaccctcagaatacataaaacaacatcgaagcacccgaaatccattcccaggctcgaaatcccatacgggcctcgataacaccaaagtctactccaaaccaaatttaaagaactagaaaaccttcaatgaaccaactttaaacattaagcgctgaaatgctcctggatcacccgaaaccctgtccgaacagatgcccaagtctaaaattatcatacaaacatattggaaccataaaatcccggtccctaggtcattttctcaaaatgtggactcaagtcaaacttggccatcatatgccactattaaggaactaagtgttacgattttaacctaaacccttccacacccaaaccaaccatctccgtaagtcatgaaacagtaaaagcacatacgggaagtcttaattaagggaacgagaatctagaaagaaaaagaaccagtcggttcattatattctccacctcttaaaaaaaatgttcgccctcgaatgggtctagaattatacatggagtggtgaataaatgtagatatctgctcagcatatcctcctcggtctcccaaatcgcttcctcaacttgttgacccctccacttgacctttaccggaaaaagtttcttggacctcaactggcgaacctacctttcaacagtagcaactagctcctcctcaaaacccaagctcacatctagctgaaccgtgttgtaatctaacacatatgacatgtcggcatagtacttccagagcatagagacatggaagaccggatgaactcccgatagactggaaagcaaagcaagatactaagcaacctccctaactcgccccaacacctcaaatgggccaatgaaccttgggctcagcttgcccttcttcccgaatctcatgatacccttcatcgacgagactttcaagagaaccttctcgcctgccatacatgataaatcacgagccttctgattttcgcaaattttttgtctggattgtgctgtgcgaagctgcttctgaatcaactttaccttctccaaggcatccttcactaaatcagtgcaatataacctagcctcgccgggctcaaaccacccgatgagcgaactacatcgctgaccatataaatcctcaaatggagccatcagtgctggactaataactattgttataataaaactcgtccaaaagcaagaatcaatcccattaccttgatggtaggctagaaacccatgttttaatcatagtttgcactctaatcactatattttacttgtggttgagcttaattaatggtgatttgcgcttattatatgttttatgtcttgtaggaaatgattccgagctattaagataatttggagctaatttgaacaagttgaagatttgaagtctgagtaaaagcccaagaaattaagttggtatcacgttcgggggtcgagtaacaagtctggatatcaaaaagtgcacgaaagaaattaatctgataaaattacactaccacgctgcatggagtgtcgtgaggcgcggcgcagtagtgcaaagtggcgtgtctaaaaaaatatgctctctgaaaatttacactagcgcgaggcatagcgcaacacattagtgtattttcacggtctactttttccacttcgacttgaaaaggatagtttcatccgggcccattcctatatggtataaatacaccaaaaatacaattttagaggacttttggtcttggaagctttgggagagcattgaaggctacaagacacgagatttcatcatctttccatcaattcaatacaggagtttggattgtaacgattagattgatgctttctcactctttaattatatttgtgatgacttcttccataattatggagtagtttatcttagggttttacattgcagcgtatgccttaatttattttggtgattctttgaagtaatcgagagagatttttgagttaccatttaaattaagattgagaaatattcacgagaagtttctattagatcatttctaccaatagattcttggaagtttcaccacgcttcacattagtttatttaaaagatttagatttaatcgagaaggagtctgaatcgaaagtataagctaatcacctattgaattcgtgagaatcgatagaacctcaagagtgaaatataacagcatcatatttagaataacaatcttgcacctatcatgtcaaaacccttatttctcacattgataagaaacaaattctgctaatctctagttctttgcagtcaattgtcaattgctttactttagtagttaatcatagttcgcaatcattccaatcaagttttgatcatcctgaatagcagttaaactataaattactagagcattgtttaaatccaatccatatggagatgataatcatactatactatctttggctagcgagcatcaattttgtgttgtgttttgagacacactctgagcatatcctgtagaatttgaactttttgctgcgactgcccatcggtctgcgaatgaaaggttgtgatgatctctactcgggtgcccaactcactttgtactgctttccaaaaatgcgaagtgaacagagggcctctatttgtaatgatggaaacatgcacaccatgcaaccggacaatctcctgaatgtaaatctgggccaatctctctaaagaatacgtagtcacaactggaataaagtgtgtcaccttggttagcctattgacaatgacccaaatggcatcaaacttccttaacatccgcggaaacccaactataaagtgcatagtgatccgctcccatttccattccggtataaccatttgctggagtaggccacttggcctctggtgctcatacttaacctactggcaatttagatacctcgctacatactcaacaatgtccttcttcatccgccgccaccaataatgctgcctcaagtcgcgatacatcttcataggaccaagatgaatagaataccgagaactatgtgcctcctctagaatcttctccctcaatccatcaacattaggaacacataagcgaccttggagtcacagaacgccatccttgccaatagtaacctccttggcaccaccccgtagtaccatctctctaagaaccaaaatgtgcagatcatcatactgacgagccttgatccgctcaaataatgaagactgagacaaaacacatgcaagaactcgactgggctctaaaatatccaacctcataagtcttttagctaaggactgaatgtccaaagccaatggcctttactctgctgaagtaaatgcaaaactacccatactctcggcctttctgctcaagtcacccgcaaccacatttgccttgcactggtggtaaaggatggtgatatcatagtcctttagtaacgcaagccacctgcacggcctcaagttaagatccctatgcttaaacaaatgatgcaagctacgatgatcggtattgacttcacaggacaccccataaagataatgcctcgtgatcatgagaacgtgaactatcgcggccaactccaaataatgtacggggtaataattctcgtggggcttcggctgacgtgaagcgtatgcaataactcgcccctcctacatcaatacacaacccagtccaatgcgtgaagcatcgcaatacacaatatacatccctgaactagaaggcagtactaacacaggtgatgtagtcaatgctatattgagcttttgaaagctcaccttgcaatcatcggaccataggaacagagcacctttctgggtcaatctagtcaacggtgctgcaatagatgagaagtcatccacaaaccaacgataataacttggtaaccccaagaaactcttgatctcgattactgctcatgcttctccacactacgcaagtagatcaatatgtcatcaatgaagacaatgacgaatgagtgaagatatggcctgatcacccagttcatcaaatccataaatgtcgctagggcattggtcaaaccgaaagacatcactagaaactcatagtggtcatacctagtccggaaaggggtcttcggaacatccgaagcatgaatcttcagccgatgatacccagatctcaagtcgatcttagagaacaccctagcaccctgcaactggtaagacaaatcatcaatacggggcaacatgtacttgttcttaatgataattttattcaactagcagtaatcaattcacatcggcatactcccatcctttattttcataaataacaccagtgcaccccaaggcgacacatttggctttgatgaacccccttgctagcaactcctcaagctgctcctttaactatttcaactcttttgaagccatgtagtacggtgaaatagacataggttaggtacccgatgccaaatcaatactgaaatcaatatcacgatgtggtggcatgcctggtaaaacagaagggaacacatcggagaactcccgtaccacgggtggtgcgggcactgaatcgatcgtaggagtctctgcagtagtatctcgaacataagctagataagccaaacaacccttcttgaccatgtgtcgagcctttaggagagagataacccgactagatgcactgatagatgaacccctcgactccaatctaggcaactctagcattgccaaggtaacagtattggcatggcaataaagaatgtcatgatatagagacaatcaatccatgaccaggatgacctcaaagtcagtcatatcgagcagcaggagatccattatggtctcataaccacagaaagttacaatacaggaacggaagactcgatccacaataacataatcgcccatgtgcgtggacacatatacaggagcacccaaggtctcacgagagacatccaaataatgatcaaatagagaagaaacatatgaatatgtagaccctagattgaataatactaaagcatccctactgtcacgccccgacctcggggagtgcgatcggtgctcaaccgagataccccggtcaagcaagcctgctagatgccttctacccaacctttcccattaaaaatataagaatcagtcaccagaaatatacatgagaggagtcaagtgcttccattcttttccattaatcaaggagattcatttacgacttccaaaatattacaagtttatatatatgatgaaaaatatgttttccacataccaacacttctagttcattacccaacatcaaacactacccacaacctgtctacggagcctctagatacaacagaagagtagtatggaagtgccggcaacaaggccccagttatacctcaaaggcaatgtacaacatcaaatgacatcaggccgggaatagagtagcgctcaccaaaacctgctgaaaagggagtaactgctaacgaggatcaaagttgcctgctactgaaccacctgcatccattgaagatgcatcgctcccgacaaaagggacattagtacacatggaatagtactagtatgtaaagctaactgtcctttttaaaaatagaatgccaatgtaagaaagggaacaccatggaaacaacaattaacaatcagtgatatccaaatgccaagttaaaacatactaatttccaaaatacgaagataatattatttttggttgggagatctttagcaccgatataccactgttcacaataccactgcacttttagcatggagtttgatcacggcccgatcggctaggccgtctcatccgagacatcaaccacaatcacattctcgatcacaatttcaattataatttccaacacaatcaccaccatgtgtgcggcatggcgtccgatcacgacccgatcagctaggccatctcaccacaatgcggtgtggatcgacatcaccctattctagcaatcatctcataccaaataaggggaataatatcatcacatcaatctcatcccaattaaggggaataatttcatcacatcaatcccataccaattaaggggaataattttatcatatcaatacggggatttaccccttaatcactcatataccggtacttgtagtttcagggttaggttgttacctatccttcctcggtgactaacgatactcctaaaaatatttttgatttgcatacaaagaaaacaacaatacaaatgcatttacatcataacatttcataccgtatatagcctcattggtacttccaaccacttacaatatcattatttcattggctctcttgaccatacatataattcttctttcatggaacaatggatgtatttcatattccacactttcatttctttcctttcttgcatcatcatcataaatatcaacaaatagaatattccagaaattacaactttaagttcgttagaaatgaagaatttaagcacaatagatttctttaaaagaaatggagtaaaatgattggcgatcgatgcgcaagtaaaaatcataaacaagtagtacatcatttattcttgaaatacttttccccaaacagggcaatacaaaattttcactcacaaatatgtaagaacgcaaaacacattgaaaatactcacaaagcatagcattagttaaaacaatcacatatgggcatgacttgagtacataagcttttaggcaattttatttttgaaataattttggtacagttgaatcaaggctcatttcataacctttcacacatcatttcatttccttggcaccattggccacaagtataactttcattatcggcacagtggccacactttacattttcaactcacttctttcacattccagcatctttataacttatcaacaacaaggcatttcaaatcaagactttaggtacgcatatgagcaattaagagtcttaagtacatcgaatttttctcccacaatttggcatcataactatcctttgaaatgcaactcaaagccataccattttaatacacatatcattcttggacacattctcgaaggataacataatgtgataattggaacacaattttgaatacatacatctttcgatactttgcttactcgggataatcgaatttattaggaacaactcggaacatgggaattaggaacttgagccagccatacttgaaacttacgggaacattttggtattcgattctaagagagtagtttagccaacatacctcctttgagttttccttagattactacaatgtcccaaaaatcctagcaacttcaatctattttgagacatgacaaaattgaacacagattaggaagatattcttggtttcaactcatttgagcattttatctaacattaggtgtgcaaattttactacaaggttcttctaaaagattttcttcactccacaacccaatcgttacccatttgagctcaacaatcttccacaaatcttattggtacattcatgtataaataatacttcacacccaagaatcatatccctaatcaaccatcttctacccaaattcgaaattgaaaagtagggtttggaaccttaccttttagatgaagaacttgagggatttcttgttggatttcaaggcttgagcaagatttgatgaataagggcttaggaatttctcctcccactctcgggaactttcccctctctaaaaatatcagattaaccatccaaaatgaccctaagatcgttttataggaactagggtcgggttatgaaattannnnnnnnnnnnnnnnnnnnnnnnnnnnnnnnnnnnnnnnnnnnnnnnnnnnnnnnnnnnnnnnnnnnnnnnnnnnnnnnnnnnnnnnnnnnnnnnnnnnnnnnnnnnnnnnnnnnnnnnnnnnnnnnnnnnnnnnnnnnnnnnnnnnnnnnnnnnnnnnnnnnnnnnnnnnnnnnnnnnnnnnnnnnnnnnnnnnnnnnnnnnnnnnnnnnnnnnnnnnnnnnnnnnnnnnnnnnnnnnnnnnnnnnnnnnnnnnnnnnnnnnnnnnnnnnnnnnnnnnnnnnnnnnnnnnnnnnnnnnnnnnnnnnnnnnnnnnnnnnnnnnnnnnnnnnnnnnnnnnnnnnnnnnnnnnnnnnnnnnnnnnnnnnnnnnnnnnnnnnnnnnnnnnnnnnnnnnnnnnnnnnnnnnnnnnnnnnnnnnnnnnnnnnnnnnnnnnnnnnnnnnnnnnnnnnnnnnnnnnnnnnnnnnnnnnnnnnnnnnnnnnnnnnnnnnnnnnnnnnnnnnnnnnnnnnnnnnnnnnnnnnnnnnnnnnnnnnnnnnnnnnnnnnnnnnnnnnnnnnnnnnnnnnnnnnnnnnnnnnnnnnnnnnnnnnnnnnnnnnnnnnnnnnnnnnnnnnnnnnnnnnnnnnnnnnnnnnnnnnnnnnnnnnnnnnnnnnnnnnnnnnnnnnnnnnnnnnnnnnnnnnnnnnnnnnnnnnnnnnnnnnnnnnnnnnnnnnnnnnnnnnnnnnnnnnnnnnnnnnnnnnnnnnnnnnnnnnnnnnnnnnnnnnnnnnnnnnnnnnnnnnnnnnnnnnnnnnnnnnnnnnnnnnnnnnnnnnnnnnnnnnnnnnnnnnnnnnnnnnnnnnnnnnnnnnnnnnnnnnnnnnnnnnnnnnnnnnnnnnnnnnnnnnnnnnnnnnnnnnnnnnnnnnnnnnnnnnnnnnnnnnnnnnnnnnnnnnnnnnnnnnnnnnnnnnnnnnnnnnnnnnnnnnnnnnnnnnnnnnnnnnnnnnnnnnnnnnnnnnnnnnnnnnnnnnnnnnnnnnnnnnnnnnnnnnnnnnnnnnnnnnnnnnnnnnnnnnnnnnnnnnnnnnnnnnnnnnnnnnnnnnnnnnnnnnnnnnnnnnnnnnnnnnnnnnnnnnnnnaaaaacggaccctccaaaatacgaaccgggctacaaaccaggctaggcacgctctgtagcgagctacagaccaagtttttacgaggcttcttgagggatataacacggtctagcgcgctacagacctcgcttcgcgagggttatagcacggtctagcacgctacagacctggcttcgcggcggttatagcacggtctaacgcgctacagacctagcttcgcgtgggttatagcacggtctagcgtgctacagacctggattcatgaggattatagcacggtctggcgcgataagagctggtggcgcgaggtcaaaatgattcaactcccctaacacattgtttaacccaaaaagttcgaaaatacaataaattagcctaccttggcaccacggaaccttaaattccttagcgaaatttttaggggccttacattctcccctgctaaggatcattcgttctcgaatggggagtagagtccgtcctcaaacacttaacataaatcatttcttcttccacacatcttaagctcccaaatttgagtaactcccaaatttttcagaaatttcgtcagagtctcctctgcaattgggccttaccatctgccagaaaatcaccataaccaccctatcaacacatccacaactcgacaaagaaatacaatgtatatcaataacactaatctcaacattacaggcattatattattaagagtgatatctggacatgtgctgcacatatttaaatcataacacatagaaagtatctttcgattcacaatcatttgactatacaatagagtgagaacattttttttccttaacactttcggccttcgaggtggcctcctcgactcatagacttcgccataatactcgactgaggctatcccaacttccggacttatttaacaaggatgacaattaagtacctctcgtaggccaattatccaataacttcacctttactaggttccaccgaaatgatagacaaaggattttcaactaccttcttagacatagacacatgaaacgccgggtacatgaaggacaatgatggggaattatcatactcatagttcggcatatttccttcaagattttataaggcccaatgtgacttcacatactttacctttattagcaattcacataacatcctcatggagaaaatatttagaataattagttcactttcttcaactctaaatctctacgccgaacacccaaactaaacctttggcgacctccaacaattactctaagatgtgatggcttgaatataaccataaaacttcttatccaatatatttgatcacgagattatgcttcttttttgacatgtttgaaccttcaacccccgtaggtttactataaataggaacaacgagatttgatattgggttggaattattcaagatccatcaatgtgctgagcagggtatttcgggaggttatatcctagagacataaaggttactatcgatagcgctgacatggttattcgttgtgatgacatcattaattcgacacatgaggcataaagtttcctagtagacgttgataaagtgggaaccatgtgcatgatcttaagatgtaaaagaagtgagtcattgtagacatgtgatatatgggaggcattatcgggaggataaagacattagcatcagttattcttggaagactatgagttatgaaaagtacaacaacaattgtttcattccctatgtgccttgttcggcaatagtaagccttaagaagaaataaccaagtacgtgacaccaattgccttcgtgagtgtaaggaaaattggtttaactcaaattagaatattctagcaccttgaatgtgatatgggtttcaaaatacatgaagttgcattatgctcctaacagtaactagcacaaggaatctatgccacaagcccatgatgttgaaaaggaagttgaacacttgcgagattattatcgttctaacaacttaacccttcataatagttgatcctatatgagaggaccagagatacggcaaaattttctttcaaatcaatatactcatgctatgtgctagaatcctaaacatccacctgaggttaggagggaaaggtcgcggtaaggttacttaactttcaaccatacacgagtgaaaccatgtagctaggacatcttaacagtggggtgaaatcatgtattggttagagagaatgaacactttgctatgagctagacatgtttttgccataataactctcaagctataataccaggcactatcatgggcaattacaatacaaggaacaaactgagttactcactaaggcatgatctaggtggacatgaaagtcatactgagatgggcgaacaaaaagatctttctgtgacgaatttatgaaaatctcaaatttcccagaaactttatacggacaagtgacccctttcaattgacatgtatacatatgataggtgctaagatattctctcatgctactagacagcaaaaaggattcatgataatattcacaaagtagtaaagtgattgttccaaccataggagccaaatacaccggagataaaaagagtggctcaagaaggatctcaacactaggccgctatacattggatttgataccacataggtaaactttatgactgtgcatgcatannnnnnnnnnnnnnnnnnnnnnnnnnnnnnnnnnnnnnnnnnnnnnnnnnnnnnnnnnnnnnnnnnnnnnnnnnnnnnnnnnnnnnnnnnnnnnnnnnnnnnnnnnnnnnnnnnnnnnnnnnnnnnnnnnnnnnnnnnnnnnnnnnnnnnnnnnnnnnnnnnnnnnnnnnnnnnnnnnnnnnnnnnnnnnnnnnnnnnnnnnnnnnnnnnnnnnnnnnnnnnnnnnnnnnnnnnnnnnnnnnnnnnnnnnnnnnnnnnnnnnnnnnnnnnnnnnnnnnnnnnnnnnnnnnnnnnnnnnnnnnnnnnnnnnnnnnnnnnnnnnnnnnnnnnnnnnnnnnnnnnnnnnnnnnnnnnnnnnnnnnnnnnnnnnnnnnnnnnnnnnnnnnnnnnnnnnnnnnnnnnnnnnnnnnnnnnnnnnnnnnnnnnnnnnnnnnnnnnnnnnnnnnnnnnnnnnnnnnnnnnnnnnnnnnnnnnnnnnnnnnnnnnnnnnnnnnnnnnnnnnnnnnnnnnnnnnnnnnnnnnnnnnnnnnnnnnnnnnnnnnnnnnnnnnnnnnnnnnnnnnnnnnnnnnnnnnnnnnnnnnnnnnnnnnnnnnnnnnnnnnnnnnnnnnnnnnnnnnnnnnnnnnnnnnnnnnnnnnnnnnnnnnnnnnnnnnnnnnnnnnnnnnnnnnnnnnnnnnnnnnnnnnnnnnnnnnnnnnnnnnnnnnnnnnnnnnnnnnnnnnnnnnnnnnnnnnnnnnnnnnnnnnnnnnnnnnnnnnnnnnnnnnnnnnnnnnnnnnnnnnnnnnnnnnnnnnnnnnnnnnnnnnnnnnnnnnnnnnnnnnnnnnnnnnnnnnnnnnnnnnnnnnnnnnnnnnnnnnnnnnnnnnnnnnnnnnnnnnnnnnnnnnnnnnnnnnnnnnnnnnnnnnnnnnnnnnnnnnnnnnnnnnnnnnnnnnnnnnnnnnnnnnnnnnnnnnnnnnnnnnnnnnnnnnnnnnnnnnnnnnnnnnnnnnnnnnnnnnnnnnnnnnnnnnnnnnnnnnnnnnnnnnnnnnnnnnnnnnnnnnnnnnnnnnnnnnnnnnnnnnnnnnnnnnnnnctgagcagatattacccatttgaatcaaaatgttctgtaagaaattcatcaggtatagtcccttgtcgagaatttaggaaagcaagtgggaagtattaatcctagagttataactcaattcaaggacagaattatagaactcaattcctcaagaggtcgtaaataagagaattgtgatcaataggcttcacgaatattgcgtctcattcaaagagtaggtacatgcaatgttttgtgattcaacgatttggttaagaccatatctatgtaggcccctttaatatggatgtacatatacaacaaataaaataatgtggtgttcacaatgaggtagaaatgagtgatttacttggtgattttagattgatagggaagtaccttaactgatgccccttgactccacatccgtaacatacattggtaccatagtgacatacccctcaatgaaatcttttacacttcacacaatgaggatgaggtctgttaaactaactcgcaccaccgacctgatatttaccctttttgcatacatcaaaaattttcccctatccttcctccagaacccctatgacgggactaacaatctctatatcggttttctgtgtggggctttggaattcctcaagcctaccacccctaacacggcaaaaatatttctttcccgcatatcgggtagaccgggctaggtgtacccaacctagtgaatttgttcttcttgtgccccctgtttccaaaaccataacatatttcaatagtgaccaaacataaactcaagtggtggttcttacaaatcaaacaatccggcttattagagccgacaatcctctttcgtttcttaggttccctcaccacatgatctggtggcgcagtgacattaatatgaacaaggacgcttcccctagtaactagttctttcatttgctcctcgttgcctcgaactcatgggttactcatctggaaaatgagacatgacgaggaaattaacttcttattttgagcattaccgcacaatctggaatactaaataagggtgacattcctaaatgcccatatagcctcctaattatagatgtggtcgataacacaccgataagaaggattctactagacacggctctgagatatcctaggacactttaaaaccttaggctttgatactaagtttgtcacacctcgacctcggggagcgtgaccagcgctcaaccgagataccccgatcgagtaagtctaatagatgccttctacccaaccttgcccattaaaaatataagaatcagtcaccagaaatatatatgagaggagtcaagtgctcccattcttttccattaatcaaggagattcatttacgacttccaaaatattactagtttatagatatgatgaaaaatatgtttgccacataccaacacttctagttcattacccaatatcaaacaccacccacaacctatctacggagcatatagtacaatagaagagtagtatggaagtgccggcaacaaggccccgactatacctcaaacacaatatacaacattaaatgacatcacgcccggaatagagtagggctcaccaaaacctgctaaagggagtaactactgacgaggaccaacattgcccgctgatgaaccacctgcatccattgaagatgcagcgccccggcaaaagggacgttagtacatatggaatagtactagtatgtaaagctaactgtcatctttcaaaatagaatgacaatgtaagaaagggaaaaccatggaaacaacaatcaataatcaatgatatccaaatgccaagttaaaacatactaatttccaaaataaaaagataatattatttttggttgggagatctttagcatcgatataccactattcacaataccatcgtacttttagcacagagtccaatcaagacccgatcgggtaggccgtctcatctgagacatcaaccacagtaacaatcttgatcacaatttcaattataatttctagcacaatcacaaccatgtgtgcggcatagcgtccgatcatgacccgatcggctaagccgtctcaccacaatacggtgtggattgacatcacccttttatagcaatcatctcatcccaaataaggggaataatttcatcacataaatcttatcccaattaaggggaataatttaatcacatcaatctcatcccatttaaggggaataatttcatcagatcaatacgggaatttacccctcaatcactcctacaccggcatgtgtagtttcggggttaggttgttacctacccttcctcggtgactaactatactgcaaaaaatatttttgatttgcgtacataggaaacaacaatactaatgcataccttataacttttcataccgtatatagcctcattggtactttcaaccacttacaatataattatttcattggctctcttggccatacatataattcttctttcatggaacaattgccgtatttcatattccacactttcatttctttcctttcctcatcatcataaatatcaacaaatagaatattccggaaatcataactttaagttcatcataaatgaacttagtatgatttcttttataatgaacttaaagttatgattaatggagtaaaatgattggcgattgatgcgcaagttaaaatcataaagaagtgacgcaccatttattcttcagatacattttcccaaaaagggcaatgcacaatttccattcacaaatatgtaagaacgcaaaacacattgaaaatactcacaaagcatagcattagttacaacagccacatatgggcatgacttgagtacaaaagcttttaggcaattctatttttgaattaattttggaacagttgaatcaaggctcatttcataacctttcacacatcatttcatttccttggcaccactggccacaagtataactttcattattggcacggtggccacactttacatgttcaacccacttctttcactttccagcatctttatagattatcaacaacaaggcatttcaaatcaagactttaggtacacatatgagcaattaagagttttaagtacatcgagtttttctcccacaatttggcatcataactttcattcgaaacgcgactcaaagccataacattttaatacacatatcattcttgtacacattcccgaaggataacataatgtgataattggaacatattttgaatacatacattcccgaagatgttcagtatttattattcaaaatgcagtatctatttacttcgggaatagcgcgctatattttgaatacatacatctgaagtctgtggacgctggcagatataccttgaagtctccatgtacagtccaactcactagtatttggcatggtaggaaaaacctggatctgcacaaaacgatgtgcagagtgtagtatgagtacaccacaacagtacctcgtaagtgccaagcctaaccttggtagagtagtgacgagtttagcgtatcatctatatatacataaaaaacaattcaaaccttatatataagtgtaacatttgcccctagttgggggtggtcatcagaaagagcttaattttcggaatcaagtctcctgctaacatatattataaagcattagatcgagaatgaagcttgatgacaagaactcagatctaaattttgattataacggtataaaattagacgttatataaaattagaaacgctatcaaaatgcaaaataaaataaataaataaaatgcaaaattcgctgcatcgaagaacattgtacgtcattgcattatcatattgagaagttgctcctttttagttgtaataattaaatcaaatacaaatatttttataagaatgcagagatattaatcaacttcacatgacacaaagttatatgataatattaccttattgaaaaagtaattgcatctcttcatttggggtcattcagagttttttagacgagttcgacataagtttgggatttgaaaatatggattagtttcttaagctcaaattgaggtgtgattcatggttttgatgttattttatgttatttgagacctcgagtaggtccgcgttatgttttaggactttttggtgtaattggaccaggtcccaaggtgctcgaatgagtttcgaatgagcttcggattatcttggccttagttggcattcctgttattatatttccgcacctgcgaggtcaagtccgcaggtgcgagtccacagacgcggatgcctatttgaagatgcagacctgggggggcgcatcttggttctcagatgcaagttaggtaagcgccctactggttaaaagaaaagtaaggcagaagatataataatatttgaaatgactgagaatttaaataacgagaagcttcagaaattaatagcacagcaaaatagaggtaaacaacaggggcgctctcgaggtaccacctcgtagtcccaaatgtaaatatgcaacacaggggggacctcctgaggaaccgcctcatattcccaaagtaaatatgcagtgcatgggatctcctgagaaacctcctcgtagtcccaatgtaacaccccggaaaaattagaagtacttaagtgctattaagaaagtcgatgtgtgctaattatattattatgtgtaaagacgaggactattaataggatggatatcaattgaatatgataataaatgtaccaggcatattataagtgatgtgggggctaaggagagccctaagtccaagtcaagttggaaatttctggatagactaaagttccaaatgagtacgcacaagaccaaactttggacgagaataactacatatttataaggagttatgtggtgaatgacctattaaattaaatttatttgactctagtttctaatgctaaaaaccgttaatcatttggacattcctacaagaggttatgaccaaattaccaaaggctggcggaggagtctgcggatgcgaatcatccgaggccgcatccgaaagacaagctagcagtgaagtgcttccatagcattatggtccgcatcggagattcaaagaggagtgaagtggggatgcgaagcatccagggtagcatccaaaacccagaaatctgggcctattaatacaatacaatttcggggttcatttttcccatttcatttgaacgtattttggagctcttctccactctctctcaagaccaccaactcccctattattcaaggtaatcaatccacattatgttggtgtgaaattccataatttctacactagtattgataattcttctcataaaatacttagatcttcaagaaatttcttcaagaactcaaagaagggttttgcaagatttcttccaaaatgtaatcctacacccttagacttacatgtatggatatattatgtgaatatgagtatgaattaagtattggaacttatgatatggtgattaaaaaccataagtatccaatttaaatacataaccattgtagagattgaaagttgattatttgatggaattttgttggttaggtgtggatgatgaattgtgtaaaaatgatggtaggatatattgttggtaaatggtagtagttggatgaactaattctatggttaagagatgtagagattcatgcctattatgtgtttgataaagtgcctaaatggcctaaattatggaatttgttactaataatggtcccattggatgttgttattgtagattaaagttgcttagtattgtggattgttgtagtatcattaagggacgaatttaaggtatgttggctaaacttctatcttagaattgagtcccacgatgttcttgtaagtctcgagttattcattataaattacctattccaaataagttttgtgttgaaaggtatatgttcaaaatgtattctgggtgctcttatcataggatgttatccttcgggaatgcgttcaaagcatgagttgggtattaaaatgttatgacttcaagtcgtgtttcaagtcaaggctaatatgccagattgtgtaagaaatctcaaggtgcttaagactcttaattgttcatatgtgtactaaatatcgtgattagagattttttgttgtcgataatctataaagatacttgaaagtgaaagtagtgagtagtggatataaagtgtagacagcgtactaagaatgaaagttatacttatggccaatagcaccaataaaatgaaatgatgtgtgaaagattatgaaatgagccttggttcaactattccaaattgactccgaaaatagcattgtccaaaagcttatgtgctcaagtcatgtccaaatgtggttgttctaactaatgctatgcttcgtaggtatttccaatatgttgtgagttattacatattcatgagttgaaattatgtattgccctttttggggagaggtacttgaagagtattctataggatgatgattatgatgataatccttgaaagaaaaaaaattaagtgtagaatatgatatacggccacagtgccatgaatgaaaaataatatgtatggcaaagggagccaatgaaataatgatgtgtaagtagttgaaaatactaatgaagtgatatatgatgtgaaaaggttatgagatgaacatattcgtatttttgtttccaatgtgctgtaagctccaacgccctcatgaggagaggctaaggtgttcctaaatatttcaaatgttcttgatgtcctgtgatcacccatggcaagtacaagtaagtgatagtataaacatgaaatgtggccgttttccaaaatgagaattatgaggtgttatatgtcccaatggcttcaatcatagtatgtatgcttctaaaataattaatgtaaatgacttcgatgttaagtccccaagaatcatgaacatatctaatggaattaagatgacaagggagtatataatgaggtggaagagggatgtcctatgctaagtgacgataaatgttatggaaaacgtatatgggccatgtgccattgaaattgacttattgattttaccatacatgtgctaatataatgaggtgtatttctccatgatgagcatgaatatgaacatgaagtgttccaatgatccgggaacttacgacctcaaaagtagcgttattcatgtagctttgggtttttatatatggtcatgtgcataatgatcctctatttttacgcaattatgttatacccccattggggagaaagttttgtacggattcaatgtgatcaaattctaattcacatatgacaaaatcttatgaacttatattattgttaagatcaaaggtgccaaaggatatgatttgaaaggaaatcttttgtactaactattatcgtttgagaatccaaattgtgatattgtggttacacctccacccgcatatattggggtgaggcggcagagccaattttgtagggattgtagtattatgatacacctccacccacatatattggggtgaggcggtagggccgctttgtgtaaggattatgatattgtgatacacttccacccacatatattggggtgaggtggtaggactactttgtgtaaagattatggtattgtgatacacttccaccagcatatattggggtgaggtgataaggccgctttgtgtagagattatggtattgtgatacacttccatccacccgcatatattggggtgaggcggtagggccgctttgtgtagagattgtggtattgtgacacacctccacctgcatatattggggtgaggcggtcggccgctttgtgtagatattgtggtatcgtgatacacctacacccgcatatgttggggtgaggcggcatggctgctttgtgtgaaggtagttatagtggatccccgacttaatatctatatttttaatggaagctcttaataaattttcttgatgttaacggctatctaagcccttttactattaccatgattcatcatattcatgttgtatttccaagcccttgaataggcgtgtttgtattgtgtaagtaaacattgtgaacggtctatgaaacacacaggtttattgtataggtgatactgtgaacggtctatgaaacacacatatgtattgtataggtgatactataaacggtctatgagatgcataggtgtataatatgatatgtgaacactaaggacggtctatgaaatgtatatgtgtaaaataagggaggaggtgccactttcattggccttgtttgtacatgttgttacaattacattatattatgtattccacgtatagtgcatatggctcagttgatcctaaaagaaatttacaatgatgcaagtataataagacttgaaatgtgattatatgggctgtttcatagtttcttgatgtactttatttgcctcttatttgagttaccatattttcatatgttgttttgactgccttacatacaagtactattccacatgtactcatgtcccttttgccgggggcgctgcatcttttaatggatgcatgcatacttctacaggatgatatggatctttgatagggattttcttcactgctcagcttatggtgagcccgctacagttctagtgggtgtttgggtctagttcattttatgtatttaggtatctattgtcatagaagctccatgtacagtgtgggtcatgtaattaaagatttgagttttgtcatgtatttatgttcacattatttacagttatttataaagctatgtaaccatcatgagaaagaaattatggaccactgagtcaaatgtattcaatatgaaagttaaaatctaattatgttatggtaaatcatgcatgagtaatgatgagaggttaatgtaaattaggtttgctcaactgggtttactcggttgagcgccggtcgcgctccctgagttcggggcatgacacccaaagtaaatatgcagtacagggggatctcccgagtaactacctcgtaatcccaaagtaaatatgaagtacaaggggatctcccgagcaatcgcctcgtagtcccaaagtaaatatacagtatagaggggtatcccagggaatcgcctcgtagtcccagagtaaatatgcagtacatggggatctcccgaggaaccgcctcgtagtcccaaaattaatatgcagtacaaggggatctcccaaggtatcacctcgtagtcccaaagtaaatatgcagcagataaccgaaccgaaggaacaaagaatttacagcaagacatcttacagttacagatttaattcaaatgaggggaagcaggtaattnnnnnnnnnnnnnnnnnnnnnnnnnnnnnnnnnnnnnnnnnnnnnnnnnnnnnnnnnnnnnnnnnnnnnnnnnnnnnnnnnnnnnnnnnnnnnnnnnnnnnnnnnnnnnnnnnnnnnnnnnnnnnnnnnnnnnnnnnnnnnnnnnnnnnnnnnnnnnnnnnnnnnnnnnnnnnnnnnnnnnnnnnnnnnnnnnnnnnnnnnnnnnnnnnnnnnnnnnnnnnnnnnnnnnnnnnnnnnnnnnnnnnnnnnnnnnnnnnnnnnnnnnnnnnnnnnnnnnnnnnnnnnnnnnnnnnnnnnnnnnnnnnnnnnnnnnnnnnnnnnnnnnnnnnnnnnnnnnnnnnnnnnnnnnnnnnnnnnnnnnnnnnnnnnnnnnnnnnnnnnnnnnnnnnnnnnnnnnnnnnnnnnnnnnnnnnnnnnnnnnnnnnnnnnnnnnnnnnnnnnnnnnnnnnnnnnnnnnnnnnnnnnnnnnnnnnnnnnnnnnnnnnnnnnnnnnnnnnnnnnnnnnnnnnnnnnnnnnnnnnnnnnnnnnnnnnnnnnnnnnnnnnnnnnnnnnnnnnnnnnnnnnnnnnnnnnnnnnnnnnnnnnnnnnnnnnnnnnnnnnnnnnnnnnnnnnnnnnnnnnnnnnnnnnnnnnnnnnnnnnnnnnnnnnnnnnnnnnnnnnnnnnnnnnnnnnnnnnnnnnnnnnnnnnnnnnnnnnnnnnnnnnnnnnnnnnnnnnnnnnnnnnnnnnnnnnnnnnnnnnnnnnnnnnnnnnnnnnnnnnnnnnnnnnnnnnnnnnnnnnnnnnnnnnnnnnnnnnnnnnnnnnnnnnnnnnnnnnnnnnnnnnnnnnnnnnnnnnnnnnnnnnnnnnnnnnnnnnnnnnnnnnnnnnnnnnnnnnnnnnnnnnnnnnnnnnnnnnnnnnnnnnnnnnnnnnnnnnnnnnnnnnnnnnnnnnnnnnnnnnnnnnnnnnnnnnnnnnnnnnnnnnnnnnnnnnnnnnnnnnnnnnnnnnnnnnnnnnnnnnnnnnnnnnnnnnnnnnnnnnnnnnnnnnnnnnnnnnnnnnnnnnnnnnnnnnnnnnnnnnnnnnnnnnnnnnnnnnnnnnnnnnnnnnnnnnnnnnnnnnnnnnnnnnnnnnnnnnnnnnnnnnnnnnnnnnnnnnnnnnnnnnnnnnnnnnnnnnnnnnnnnnnnnnnnnnnnnnnnnnnnnnnnnnnnnnnnnnnnnnnnnnnnnnnngttaaggcatgtatacatgtgatactaggctaaacatgatcactacatatgctaaggtaattcagttaaggaatttaaaagaagacaactcaacgagaaccgaaatttccacattagcccgtgtatgcactcgtcacctcacgtacaggtgctcacatattacaaattgtcacaacaatatcaaatcctaaggggatttcccccacacaaggttacacaagtcacttacctcaaatctcgctcaatcagtcaagtagtatgcatttccctcgattttccaactttgatcagctcgaatctagccaaaacaatttcatactataaatataactacaaggaactaatttaaaatttgaaactacgaatttagcaaaaattgaaaattcggcccaaaaggtcgacccgggcccacgtctcggaatcggataaaaaccacaaattatgaacacccatttgacaatgagtccaaccatactagtttcactcaaatccgactctaaatcgacattcaaatctcaaaaattcattgtatgaagtttctacaatttttcccaaatttccatctcaaaatactaattaaatgatgaatataatgatatattcgtgtatattaaccaaatccgagttagaatcacttaccgatgtgactttcttgaagaaatccacgaacaatcgccacaaaccgagctcctaaactccaaatgtgaaataatactttaaacatcgttaatatagtacaaaattagatctcccattgtgctggccaatttttgttttgttgcggtccgcacatttaaggtctctgcggccgcaacccaaattgtgcagtcgcagttcagcagcatttgcactaccatgctttagtaaattgaccataactttttgtacaaatgtccaaataataaatagtttacttttctgaaaactatactcaaaggtctacaactcttttttggatcacctccaaattccttttagatcaaagatataagcttccgaagtcagaccatcgaacctatagattctcctttctgcaaccgcaagaggatttctgcagcctcaagaggatttctgcagtccgcaattttcctctgtagaccacaattttcctccaaggtccacaattatcctctaaggcccgcatatgaggctttgcctcagcactccaaaatgtgcccccgcactccaactgttcccagagcatcaccagagtgccgaaattcccaaactcgttcaaaacgcaccctgaaacacacccgaggcccccgggacctcaaccaaatacaccaacaagtcctaaaacatcgtacaaacttagtcgagcccttaaatcacatcaaacaacactaaaaatacaaattgcgcatcgattcaagcctaataaaccttaaacttcaaacctctacatccgacgccgaaatctatcaaatcaagtccgattgacctcaaattttgcacacaagtcataattgatattacggaccaacttcaacttacggaatcagaatccaaccccgatatcaaaaagtccacttccgatcaaactttctaaaattcatcaaatttccaactttcgccaattgacgctaaaatgacctacggatctccaattcaacattcgaacacgctcccaagaccaaaataccactacggatctattgaaatcgtcaaaactccattccgaggccgtcttcatatacttcaaactacggtcaatatttagaacttaaacttccattttagggattatgtgttccttttcactccgaaaccaaaaacaactcctccccgcaagttacgtaaccacaaaatgaagtagagggagaagtaaataggggttcagggctaatactttcaaaatgaccggccgggtcttacaacctccccctcttaaaacaaacgtttgtcctcgaacgagtatagagacataccttaactggtgaaaaaatgaggataacggctgcgcatatcatgctcggcctcccaagtcgcctcctcgatcggatgacccctgcactgcaccttcactgatgcgatgttctttaacctcagctttcggtcctgcatgccccaaaaggccactggctcctcaacataagatagatccttgcccaactggactgagctaaagtttaacacatgagacggatcgtcgtgatacttccggagcatggaaacatgaaacactggatgaactgcagagagaatagtttgtagtgcaagtctgtaagccacctctccaacactctcaagaatctcaaaaggctcgatatacctagggctcagcttgcccttctttccgaacctcataacaccctccgtgggtgaaatgcggagcaagacccgctccccaaccatgaatgcaatgtcatgaaccttccaatttgcataactcttcttcctggactgggctgtacgaagtcgatcctaaatcaatttaaccttttccaaggcatcctgaatcaaatatgtacctagtagtctagcctcacccggctcaaacgaacccactggagaccggcaccgtctaccatacaaacctcatacagtgcaatctgaatgctcgactgataactgttgttgtcggcaaactccgcaagtggcaagaactgatcccaggcaccaccaaatcaatcacacacgcacgaagcctatcttcaaatatctgaatagtgcgctcagactatccgtctttctgagggtgaaatgttgtactcaactccacatgagtaatttcacagtgcacggctctccagaaccatgatgtaaactatgtaccccgatcaaagatgatatataccggtacgccatgaagtctaacaatcttacgaatgtaaacttaagccagatgctttgaagaataggtaataaccataagaatgaaatgagctgacttggttaacctatccacaatcacccaaactgcatcgaactttctctaagtctgtgggatcccaacaacgaaatccatagtgatccgttcctacttccattttggaatctccaacttctgaccggttgctgatgctcaaacttcacctgctgacaatttaggctacgagctacatatcccaccatgtccttcttcatctgcctccactaatagtgcttcctcaagtcctgatacatctttggggcacctgggtgaatggagtaacgcaaattgtgagcctcttgaagaatcgactaacgcaaaccagctacattgggcacacatagcctgcccaatatccgtaatacaccgtcatctccaatagttacttccttggcatcattgtgttgaaccgtgtccttaaggacaaacagatgggagtcatcatactgacgatctctgatacgatcataaatagaagactaagaaaccacacaagccaaaactctgctcggctcggaaatatccaatctgacaaactagttggccaaggcctgaacatccaaggctaaagtcctctctgctactggtagatatgctaaacttcccaaactctccgccttgcgactcagcgcatcggccaccacattggccttcccgggatgatagagaatggtgatctcataatccttaagcagctccaatcatctccgatgccgcaagttaagatccttctgtttaaacaaatgttgtagactccggtaatcagtgaaaacctcacaaggaacaccatacaaatagtgccaccagatcttcaagacatgaacaatagccgctaactcgaggtcgtggataggatagttcttctcgttcaccttcagttgtctggatgcgtaggcaatcaccctaccatcctgcattaacaccacaccgagaccaatgtgcaacgcatcataataaaccatatagaaccccgaaccagtaggcaacaccaacactggagttgtagtcaaagtagtcttgagcttttgaaagctctcctcacaatccttggtccacctgaacggagcacccttcaggctcaacctagtcataggtgttgcaatagacgagaaaccctctaaaaatcggcggcagtaccccgccaaaccaagaaaactctggatctccgtagctgaggatggtctagaccaactctgcactgcttcaatcttctccgcgtctaccttgctcctctcattcgatactacattacccaaaaattccactgaatctagccagaattcacacttcgaaaattttgcatataacttcttctctctcaaggcctgaagcacagtacccgggtgctactcatgatccttctgactctgggagtacaccagaatatcgtcaataaacacaatgatgaaggagtcaagataaggctgaaatacactgtttatcaagtgcatgaatattgctagggcgttggtcagcccaaaagacatcacaaggaacttctaatgactataccgagtcctgaaagcactcttcgagatatctggctcccaaatcttcaactaatgatggactgaatgcaagtcgatcttagggaacactctgtcaccttgaagctgatcaaataggtcatcaatacatggcaatggatacttgttcttcattgtaatcttgttcaactagcgataatcaatacacatttgaatagaaccatgcttattcattacaaacaagacacgagcaccccaaggtgacacactgggtcgaatgaagcccttattgagcaactcttgcaactattcctttaactcctttaactctgttggggtcatacgataaggtggaatagaaatgggctgagtgcccggtaacaaatcaatgccaaagtcaatatctctgtcaggcggcatgcccggaagatctgctggaaatatgtctgcaaactccctcactaccggaactgacttgacggtaggagtatcaacactaacatctctcaaaggccagatatgcatcacaacccttctcaacctttcgttgagccttaataaatgagacaaccctgctaagaacatgatctaaggtacctatccactctagccatggtagacctggcatagccaacatcaccgtcttagattgataattgaggatagcaatatagggagacaactagtccatgccaaaaataatatcgaaatccaccatacggagcaataataaattggttcggtctcaaaaccaataagaacagtcaaatacgactgatacacattgttaacaataatagaatcgcccataggtgtagacacatagatatgtgaactcatagaatcacgggatacacccaaatatgaagtacaataagatgacacgtagtaataagtggatcctggatcgaataagacatttgcatgtctatgacagaccggaacagtacctgtgataacagaatctgatgcaactgcgtccgtcttagaaggaagggaatcatatctggcctagcctccccctctagggcgaccgctacctgtctgacctctacctctagctggctgtgcaggtggggtggtagttggtgttgtaaccatagcctcaggacctagtggagcacgcggtgcctgagaaatctatggaggtgcaaccctcctgaatttagggcaataccttaccacatgacaagtgttgccacactcaaagtaagctatcggagggcgtgactgctatgactggctcgggcctgatcgactggactgatcactgaaagcatcccgtacaagagacacactagacactggcagtgcatagtaaggactggggcccagtagtggtcggagcaccgctggcgactggaagtgctgaatgaacagggtggcccatataacccctgccccaacgagctaccgctggggcatgagtaccactataagccagactttcgagaccttttggcctctctcttgtctctatcccgagtaagcataccctctaacctcctagcaatccctattacctgctggtacgcaatatccatctctaactctcgggccatgctcaatctcatactgggtctgagcccctcaaaaaatcgatgaacccgctctcgaacagtaacaaacaaggccggtgcatgcctagccaaatcactaaatcggaccgcatactctaacacggtcatagaaccctgacgaaactgctcaaactctacacaccaagaatatctgagactctggggaacatacttcctcaaaaacctatctgagaatgagtccaagtgagtgaagctgcctcagccagactatccaactcatatgcgcgccactactaatagaccgttcctccaagctggaatgtagtgaaagaaaccccactagtctccgcaacacccatagtatggaggatacggtggcactcttcaagagaaccatgggcatcttctgacgccaagccactgaaagtaagagagtggtacttcttatacctctcgggtctgagctgctccacctcaaaaactactgccctaacctcgggctgaactggggctaccggctacatcggtatgatctctagaacctagtcggcctgaacccgctgctctggggtacccgtctatgctcttcccctggcctgagatgtggcaagagaaagcggtatcaatcttgcttgatccaaggtgctgaacatgcttagaaattggctactgtctcctggagggctggtgtagtaacaggcgtctcaggttcctgcccttcaacttgagctactggtggctcctttgtcgcagttcgtgcaggtgctctgcctgcaccacgtagacgtcctctgcccctaccccgaccttggtatctcacgactctagcagggggcatgggtgtctggtcatccgatctagttgtacgtgttctcaccatctatgagagaatagaaagacaaaaatttagagtccgaagacaaaatctcgcacgataaggaatcaaagaagtgaagctttttcctaatagttctgtagcctccagaagataagtacagacgtctcggtaccgatctgcgagactctactaaacctgcttgtgactcataacacctataaacctagtgttttaataccaatttgtcacgacccatttttttttctacaggatgtcgtgatgacacttagtctctacgactaggtaagcctacaatttgcgaaataactaaataacaataggaactcaaatcctaacacatgatctataaatagaaactacattttaaataattgcaactcccaaaacccgatagaaataagtcacaagcttctaagagaaaatactaagtgtttctatacatcaacatgatataccgacagatataccttgaagtctgcggataaggatagagggggactccgaggtctgcgtacgctggcagatataccttgaagtctccacgtacattccagctcactagtatctggcctggtaagaaaaacctgggtctacacaaaaagatgtgcagagtgtagtatgagtacaccacaactatacctagtaagtgccaagcctaacctcggtagagtagtaacgaggtcaggtcagggccctactggtttaaaagaaaagtaagctagaagatataataatatttgaaatgactgagaatttaaataacgagaagcttcagaaaataatagcacagcaaaatagaggtaaataacaggggcactcctgagataccgcctcgtggtccaaaatgtatatatgcaagacaggggggatctccggagaaaccgcctcgtagtcccaaagtaaatatgcagtatagggggatctcccgaggaaccgcctcgtagtcccaaagtaaatatgcattacataggcatctcccgaggaaccgcctcatagtgccaaagtaaaaacacagtacagggggatctcctaaggaatttcctcgtagccccaaaataaaatgcaatacagggggatctcttgaggaatcgcctcgtagtcccaaagtaaatatgcagtacagggggatctcctgaggaaccacctcgtagtcccaaagttaatatgcagtacaaggggatctcccaaggaatcgcctcgtagtcccaatgtaaatatgcagcagataaccgaaccgaaggaacaaagaatttacagcaagacatcttacagttacagatttaattcaaatgaggggaagcaggtaattnnnnnnnnnnnnnnnnnnnnnnnnnnnnnnnnnnnnnnnnnnnnnnnnnnnnnnnnnnnnnnnnnnnnnnnnnnnnnnnnnnnnnnnnnnnnnnnnnnnnnnnnnnnnnnnnnnnnnnnnnnnnnnnnnnnnnnnnnnnnnnnnnnnnnnnnnnnnnnnnnnnnnnnnnnnnnnnnnnnnnnnnnnnnnnnnnnnnnnnnnnnnnnnnnnnnnnnnnnnnnnnnnnnnnnnnnnnnnnnnnnnnnnnnnnnnnnnnnnnnnnnnnnnnnnnnnnnnnnnnnnnnnnnnnnnnnnnnnnnnnnnnnnnnnnnnnnnnnnnnnnnnnnnnnnnnnnnnnnnnnnnnnnnnnnnnnnnnnnnnnnnnnnnnnnnnnnnnnnnnnnnnnnnnnnnnnnnnnnnnnnnnnnnnnnnnnnnnnnnnnnnnnnnnnnnnnnnnnnnnnnnnnnnnnnnnnnnnnnnnnnnnnnnnnnnnnnnnnnnnnnnnnnnnnnnnnnnnnnnnnnnnnnnnnnnnnnnnnnnnnnnnnnnnnnnnnnnnnnnnnnnnnnnnnnnnnnnnnnnnnnnnnnnnnnnnnnnnnnnnnnnnnnnnnnnnnnnnnnnnnnnnnnnnnnnnnnnnnnnnnnnnnnnnnnnnnnnnnnnnnnnnnnnnnnnnnnnnnnnnnnnnnnnnnnnnnnnnnnnnnnnnnnnnnnnnnnnnnnnnnnnnnnnnnnnnnnnnnnnnnnnnnnnnnnnnnnnnnnnnnnnnnnnnnnnnnnnnnnnnnnnnnnnnnnnnnnnnnnnnnnnnnnnnnnnnnnnnnnnnnnnnnnnnnnnnnnnnnnnnnnnnnnnnnnnnnnnnnnnnnnnnnnnnnnnnnnnnnnnnnnnnnnnnnnnnnnnnnnnnnnnnnnnnnnnnnnnnnnnnnnnnnnnnnnnnnnnnnnnnnnnnnnnnnnnnnnnnnnnnnnnnnnnnnnnnnnnnnnnnnnnnnnnnnnnnnnnnnnnnnnnnnnnnnnnnnnnnnnnnnnnnnnnnnnnnnnnnnnnnnnnnnnnnnnnnnnnnnnnnnnnnnnnnnnnnnnnnnnnnnnnnnnnnnnnnnnnnnnnnnnnnnnnnnnnnnnnnnnnnnnnnnnnnnnnnnnnnnnnnnnnnnnnnnnnnnnnnnnnnnnnnnnnnnnnnnnnnnnnnnnnnnnnnnnnnnnnnnnnnnnnnnnnnnnnnnngttaaggcacgtagacatacgatactaggctaaacatgatcactacatatgctaaggtaactcagttaaggaatttaaaagaagataactcagcgaggaccagaatttccacattatcccgagtacgcactcgtcacctcgtgtacacgatgctcacatattacaaattgtcacaagagtaccaaatcctaaggggattcccccccccacacacacacacaaggttagacaagtcaattacctcaaatctcgctcaatcagtcaagtagtatgcctttccctcgatttttcaactctgatcggctcgaatcaagttaaaattattttatactataaatataagtgcagggaactaatttaaataatgaaactacgaatttagcaaagaatcaaaaatttggtccaaaatgtcgattggggctcatgtctcggaatcgggtaaaagtcacaaataacgaacacccattcgcccacgaaacaaaccatactagtttcactcaaatccgactctgaatcgatattcaaatctcaaaaatttgttttatgaaatttctacaattttccccaaatttgcatctcaaaatactaattaaatgaagaaaacaatgatatattcgtgtatattaaccctatccgagttagaatcacttacccccgatgaatttcttgacaaacccacgaaacatcgctacaaactgagctcccaaagtccaaatgtaaaataatactctaaccctcattcatatagtacaaaatatgatctcttattgtgctggccgcaaattcttttgtgcggtccgcacctttaaggtctctgcgaccgtaacccaaattgtgctcgcagttcagcaatatatgcactaccagtctttagtaaattataataactttctgtacaaatgtctaaatgataaatattttaactttatgaaaactagactcaaactactacaactttcatttttggatcatctccaaattccttatagatcaaaagatataaccttccgaagtcagaccatcgaacctgcaagaggatttatgcggtgcgcaatgttcctctgcgatccgcaattttcctctaaggtccgcacatgagactttgcctcagcactccaaaatgtgcccccgcactccaactgatcccacaacatcatcagagtgccgaaatgcccaaactcattcaaaactcaccccgaaacacacccgagccccccgggacctcaaccaaatgcaccaaaaagtcctgaagcaacatacaaacttagacaagcccttaatcacatcaaacaatcctaaaaatacaaattgtgcattgattcaagcctaatcaactttaaacttcaaacttctacatctgacgccgaaacctatcaaatcaagtccgattgacctcaaattttgcacacaagtcataattgacattacggacctactctaacttccggaattggaatccaaccccgatatcaaaaagtccactcccaatcaaactttccaaaattcatcaaatttccaactttcaccaattgacgctaaaatgacctacgtacctccaatttaacatctaaacacgctcctaagaccaaaatcaccctacaaaactattggaattgtcaaaactccattatgaggttagcttcatatacttcaaactacggttaatactgagaacttaaactttcattttacggactatctgtcccatttcactccgaaactaaaaataaatactctcggtaagttacgtaaccacaaaatataaatagagggagtagtaaataggggttcggggctaatactctcaaaacgaccggcgggatcgttacacctggcttcgtgagggttatagcatggtctagcgcgctacagacctggcatcgcaagggttatagcacggtctggcacgctaggagctggcgatgcgaggtagaaatgatttaactccccaacatactgttcaacccaaaaagttcgaaaatacaataaattagcctaccttggaaccacagaaccttaaattccttagcaaaattttcttaggccttacacctaccgtagacagaaataaaacctatgatcacggcatttgaggctactgcatctggtctagctagaaaaacatggaacctagatggaacgccaccttactggcctcgacctctagggagacccctacccacctgccctccgcctatggcaagccggtgcggcatctggtgcgttaatcatggaatgatggcccagctggccatgctacactaccttgccccggatcttggggcaagatctcctcatgtgaccaagcttccctcactcacagcaacctctcggtgcggaagatgactgaacctaagtctgaccccggggacctgaatacctactggaaggaccctgaatagccagtggactataggagctctctaggatagcactaaaatatgtccacacaggtgcaacccgagaaggcggtggtgctgaataagtgggtctactggattgacccctcacaaactgacctctgcccctagacaggatgtcgttgaatcctccagaatgctgaggcctcttctcccctatcgtatacaatcgtctctagctgcgtataccctcaatccgccgatctatctccacaacctgctcgtaaagagtccttatctctacctatcgggccataataacctgaatatcataatgcaatcccgcaataaaccttcgcactctctctgcattggtggggagtatcataagtgcatggtggaataacttagaaaatctcgcctcataatcggtcacatacatctgaccctgttagagccgctcaaactaaccccatagctcttctctctgagaggttggaatatatctctccagaaagagacatgtgaattgatcccaagtcaagggaggcaaacgtgctggtcttcaaagaagataggaccgccaacatctatgggccttgccctccaactgaaatatggtaaagtccaccctgttggactccaatactctcttgttgtgcatcttgtctctgcagcttgtccctccaatgttgcaggcacctcacgctgctccccaatgacatgatcctccattggatcggctggtggtatgatgggagaaactctaggacaccctcatcctctagcaggagctggagctctcccccgacctctacctcggcctctagaaatagggggagcagtccctccaccaataggtacatgcgttctcaccatctgtgagagaataagagaaagatacttagaacaacatcaactacacgataggagacaaagaaaaagaagtttcctaataccctatagcctctcgaagataagtacggacgtctcctcactgatcagcaagactctattaggaccgcttatgacttgtgaaacctatatgaaactagagctctaataccaagttgtcacgacccaattttcactataggtcgtgatggcacccaacgtcaccgctaggtaagccaactatgaactacccatttaattcctcatttgaatatttttaaagtctttagattttttatttaacacgagaacaattagaaagtgagcatagtaatgtaaagcataaactaaatgggaaagtaagatagtgaattgaataatcaaaacccatgagtgtctactaaaattctcaaaacccggtgtcacaagtgcacaagcatctagtaaaatatacaaaattctctaagaactactgtctgaaataaaatacacagaaatgataaaacattataagagaaggctcatggtctgcagaaaggagcatgagaagcagctcaccactaagccttcgggtaatgcgaatatgcgcccggacaaactccagatgcacttgcctcaaaacctgcacaatttgtgcagtagtgtagcgtgagtacgtaaataacgtgtacccaataagtatctagtctaacctcaaaaaagtagttacgagggttcgacatagacacttactagtgcgcaatatgcataatgtacaaggatatttaataggcatgaaatacaacatcaataatggaatcagaggaaataattaaacgatcctttaatcaaaatagcaattaaaagtccccaaatataacatgctaatctcaacaagtaaggacttaacatgtatttataaatcctaatcataaaagacatatccagtataatcggactccgagtgacaacacacacgagttatgccgatgtcgtacggcccgatccataataatcgtgtacatacactaccgaggtcgtaaaagaattgtgcatttacaactccaaggtctttagattatgaattgtgcatttacaactccaaggtaagcccataagagaatataattttcatcagtaattaaacattccacaaaatctataattaatgaagcttgatttaacataatctttaaccacgttttttcttattaatacaagcaattaaactagcaggttaagttcaaatagtgcaattaatcatgataaaggtttatgtctacccggacataacataaatatgatctacgcacagaatctcgtcacttcatgcggtcatagaacccacaattagtagcaaataacaatttaaacaccgatgggtttcattccctcttacaacgttaggcaagagacttacctcgttcccaagtccacttttcggtccacaattcactctaaaagcctcaagtcagtgctgaacaatctgaaactatccaaaggttgtacaaactaatcaattattgctcaaaagttcataatttaactataagagtgattacccaacccaatttggaaggttcctaaaattcacctccggaaccacatgccccgattctggacattttcataaataaatattacccataacctcacgaacataaatatataatttttacccaattccataatcattttcgtggtcaaatcttattttagtcaaaatttagatttttcaacaaactcctaaaattttcacatttttcatgttaagatctactcgtaatctaggtattaaactcacattgtgtagaatacacttacctcaagatgctaggtgaaaatccctctttaaaaagctccaaaatcggccaataaatgagagaagtgaacaaaatggccaaaatcccgatttttattaagtcactgcccaggactgccctcttcgcggtcgtggttgtccttcgcgatcgcaaatgacaaagtcacacaccacgaaaaattccccttagcgattgcgagaagccacttgtgaaggcgatgcattgagccaccaactcatcgtgaacacgtgcctccattcgcaaacacaaaaggcaaaggagtcgcccagcctttctaagcgaacacgatgagtcacccccgaacgtgaaggtcactggttccaaacctccgcgaacgctgccctttctttgcaaacgcaaagagcaaaagcgtctagtccccaaatccttcatcgcaaatgcgatgggccttccgcgttcatgaagaaggaaaccagaaccagcacaccagcaagtttggacttagctccaggcaatctaaaatgcacctgagccccccctcccccccccctccccccacgaaacacccatccgaatccaccaacaagtctataataataatacagaccttctagaaccctcagaacatataaaataacatcgaaactaagaatcgcacccccaaaaccaaattgaatcaacttatgaaattcaaacttcttcactagctccgaatgcgccgaatcacactaagactactcacaatcacaccaaattttgcgtacaagtcataagttaccatacaggcccattcctaggttcggaatcccaaacaggccttgataacaccaaagtatactccaaaacaaatataaagaactagaaaaccttcaatgaaccaactttcagcattaagcgccgaaatactcctggatcacccgaaacccagtccgaacacacgcccaattccaaaattatcataggaacctattgaaactatcaaatcccgattccgagattgttttctcaaacttgggctcaagtcaaacttggccattagaggccactattaaggatctaagtgttctaatttcaatccgaacccttccaaacctaaaccaaccatctttgcaagtcataaaataataaaagcacatacatgaagtcttaattaggtgaacagggatctagaaagcaaaatgatcggtcgggtcattacagataccaacttgtcacgacccaaaatcccaacctattatgatggcacctaacacaccagctaggcaagccaaaatatgataatgaaggcaaccgcataatgaaattcataaaaatacgataaatctgaggtctcaatacaataaaactaataaatacaaagtatttctcccagaaactagtaagtatgaagtcatgagcttctacaacggaatacaagtcagaaactgaacaatatatacattgtctgaattataacagcactacgaaaggaaaagacaagtcaaactgcaaccaaggatgtagctctacctcgcctctagcagatagtccaacaagcaacctactactgataattggtccccacacctggatctccatagttaagtgtagagtgtagtatgagtacaaccgacccaatgtactcaataagtatcgtagataaacacggcaacgtttagtatgaaaacatccatgtgtatatatgtacaatttctcaagtactctgcttggacaatatcttggcatatataggtgatacgcagctaaatcagataaatgatcaaggaaattgcaagtaaagatgaaatgcaaaatccaacaaaacactggccaggtttcataacttttccatatttgttccaaaccacttatcagtattctaaatatctgcatgtacaccatcaagagagaaacatgagagggtgaccctagggggtggatatgtatccacacgttgcatggacaactcacgcgctaataatagaacccgcacagacaactcatgtgctgccaaacaactcgcgtgctagtaacatcaatatctcgacccgcatggacaacgcatgcgctgccagacaactcgcgtgctagtaacatcaatatctcgacccgtatggacaactcatgtgccaataacaaaacccgtccggtatggtcacaagcataataacacaatccgcacggcggggtcataggcaccctcgtaagatcgccacaaaccgagatttttaggtcaaaagatgaaaaatgaatgaaaacccctcgaactttctatttttgcccatcgattttcgcttttatggaccaacagccacttctgcagaaaatccatggcaggtgaggcttcgactcaagccaatagtcaccgcttctgcggtccaaaatagcgcacctacgcttcggcttctgcgggcaacaaatgcttctacgcacacgcacatgcggaccaagtttgcttctacgcccccaggccatcttggccagttacgcttcagcgacctctcttcggcatctgcgacctcgcaaatgtgtaatagtcctcactcctgcgctcgcagacctcctccctaattctcgcacctgcggccactctctccgtaggtgcgatgacacaagacttcaacaacaacaacagcatccctctaagtccaaatttcaatctgttttcaatccgaatctcatccaaggcccctgagaccccatccaaacataccatcaagtactaaaatatgatacgaacttagttgaaacctcgaatcacatcaaacaacataaaaacatgaatcctaccctaattcaagcctaataaactaataaatttctaacttctacaatcaatgctgaaacctatcaaaccaactccgattgacctcaaatttgcacacaagtcataaatgacacagcggacctatactaatttcaaaaaaccaaaattcgagctcagtaaacacaaagtcaacactcggtcaaacttctcaactctccaacttcaactttttcaacttttaccaattcaagccaaaatcatctatggacctccaaatcaacatccgcacacactcctaagtccaaaatcagcatactgagctatcggaaccatcaaaactctattctggagttatttacacataagtaaacatccggtcaactcttccaacttaagcttccaaccaatggattaagtatcccaactcaattcgaaacatctccaaaaccaaaccaaccaccccggcacttcatgtaacaataaatgaacacagaataagcaataaatgggggaacgaggaaacaatactcaaaacgaccggccggatcgttacactaaagatcctattttgagagatgagttgtatagatgtatttgacatcattcaactatacttttgtaatgacccggccggtcgttttgagaatttgagccccgatcccgtaatatctcttctccccataatggtttctgcttttgggatttgttggagtgtttggttatgaaattcagggagttttgggacacttagtcctaagttgtgagtttaagccttagagattggaccgtagtcagaactgtgtgaagacggatccggaatgaatatctgtcaactctgtaagctccgttgaatgattttgagcttaggagtgtgtctggaatgtgtttcggaggtttatagtagatttaggcttgaattggccaaagtaagattttctacgatttcggccgatagtggaatttttgatatcgagctcggaatggatttccggaagtggctgtaggttcgtagtgtcatttttgacctatgtgtaaaatttgaggtcattcggactagatttgacgtgtttcggcgtcatttgtagaatttggaaaattctaaattcttaggcttgaatccgtgcttaattcatgattttggtgttgttagatgtggtttgaaggatcgactaagtttttatggtgttataagattggtttgtaggtttggttgaggtcccgggggcctcgggtgtgtttcgggtgcttaaagggtgaaagtttggacttagaggaatttttgagttgctggttctggtgttttcgcacctgcggtggggagtccgctggtgcggccgcgcagaagcgaggctggtatcgcaggtgcacttttaggccagggagtgaatgctcgcagatgtgacgaatgagccgtaggagcggagccgcatctgcgaaaggtcagtcgcagatgcggaggtgagaaggacccaaggttccgcagaaacggacgattgagcgcagaagcgcatccgcaggtgaggactcaagcgcgcaggtgcagacccatctcggataagtgaccttcgcacctgcgatgattttttcgcagatgcggccccatgagcgcaggtgcggaaatcgctgggttgaagaggcagcttcgagggttcactcctcatttttcaccaattcgatttagagcttcgagggttcactcctcgagggattttgaaggagaactctagggtaactaattctaactctattttgatcataatacataaatctattattgttttcctcgtctaattaaggaatttgagggtagaagtttgnnnnnnnnnnnnnnnnnnnnnnnnnnnnnnnnnnnnnnnnnnnnnnnnnnnnnnnnnnnnnnnnnnnnnnnnnnnnnnnnnnnnnnnnnnnnnnnnnnnnnnnnnnnnnnnnnnnnnnnnnnnnnnnnnnnnnnnnnnnnnnnnnnnnnnnnnnnnnnnnnnnnnnnnnnnnnnnnnnnnnnnnnnnnnnnnnnnnnnnnnnnnnnnnnnnnnnnnnnnnnnnnnnnnnnnnnnnnnnnnnnnnnnnnnnnnnnnnnnnnnnnnnnnnnnnnnnnnnnnnnnnnnnnnnnnnnnnnnnnnnnnnnnnnnnnnnnnnnnnnnnnnnnnnnnnnnnnnnnnnnnnnnnnnnnnnnnnnnnnnnnnnnnnnnnnnnnnnnnnnnnnnnnnnnnnnnnnnnnnnnnnnnnnnnnnnnnnnnnnnnnnnnnnnnnnnnnnnnnnnnnnnnnnnnnnnnnnnnnnnnnnnnnnnnnnnnnnnnnnnnnnnnnnnnnnnnnnnnnnnnnnnnnnnnnnnnnnnnnnnnnnnnnnnnnnnnnnnnnnnnnnnnnnnnnnnnnnnnnnnnnnnnnnnnnnnnnnnnnnnnnnnnnnnnnnnnnnnnnnnnnnnnnnnnnnnnnnnnnnnnnnnnnnnnnnnnnnnnnnnnnnnnnnnnnnnnnnnnnnnnnnnnnnnnnnnnnnnnnnnnnnnnnnnnnnnnnnnnnnnnnnnnnnnnnnnnnnnnnnnnnnnnnnnnnnnnnnnnnnnnnnnnnnnnnnnnnnnnnnnnnnnnnnnnnnnnnnnnnnnnnnnnnnnnnnnnnnnnnnnnnnnnnnnnnnnnnnnnngtgggggaaaaggttccccaattgaaaatctgagatttgaatgggaatttgacgttggatttagataatttttgttcaagtgaactcgtgagtgaatgggtgttcaaaatttgtaatttttacccgataccaagacgtgggcccgaggagaccttttggccgtttttcctaattcaaactttagcctcgaattaattatctaaattagttaattgtagttatatttatattatgcaattaatttgaatagattccggccatttggagtcggatactcatggcaagaacatgatatcgagttgatttgagcggttcgaggtaagtggcttgcctaatcttgtgttggggactttcccttaggatgtttgatattaattgatgtgtgggtgccttttacgtgaggtgacgagtacgtacacaggctattattgcaaaaatcccgtttttactttctaaatcataaactgtttttccttattatattacactgatacgtttaattgctaaacttagattagagaagcatgcttacgtgttttaactgcctaattgacattttgtgtgccatgcttagttaagtccctattttccttatctgtgtccagtannnnnnnnnnnnnnnnnnnnnnnnnnnnnnnnnnnnnnnnnnnnnnnnnnnnnnnnnnnnnnnnnnnnnnnnnnnnnnnaaactgtataactcgatgccatacctgctatttcatcttgcgttgcatatttaaattggtactgcggatgtattgcaggagatcccccctcccctgtactgcatatttattttgggactacagacgtattccgggagatcccccagcactgtatatttacttttgaactacggacgtattcctggagatcccccagcactgcatatttactttgggagtacggacgtattccgggagatccctcagcactgcatatttactttgggactacggacgtattccggaagatccccctgtactgcatattcatttggaactacgggacggtatcccaagagactccccactgtgtttactttgttctaagccgagggctcccttaactgttcaattttcaagaattgctttaactgtgttaccataaattttacttatatcttttactgtttaatttattatatttactccaatagggccttgacctgacctcgtcactactcgaccgaggttaggcttggcacttaccgggtaccattgtggtgtactcatgcccttccctgcacatattttcgtgtgcagatccaggtgcgagctatcagcctcggggttagtgcgtgttgctgactctaggagactccaaggtactattgcttgcatccgaagatcttcggagtccccttctactcccttacctagagactttcattattatctttagacttttgtatagagctacatagattatagcaccttgtgacttagtgatattccgggtcttaggaaattatttgtatatgccgagtggtactactcttggctattcacaatatgctgtttatctttaaaatgttgtattttctttatatttttcgtaatattaggcttacctnnnnnnnnnnnnnnnnnnnnnnnnnnnnnnnnnnnnnnnnnnnnnnnnnnnnnnnnnnnnnnnnnnnnnnnnnnnnnnnnnnnnnnnnnnnnnnnnnnnnnnnnnnnnnnnnnnnnnnnnnnnnnnnnnnnnnnnnnnnnnnnnnnnnnnnnnnnnnnagtcgtaaagactaggtgtcatcacgacaccttacggagggttaatttgggtcgtgataagttggatcaaagcactaggttcataggagtcgcgggtcacaagacgatttagtagagtctcgtggatcggtacagagacgtccgtacttatcttcgggatgctatgtaactgttaagaacaatcatatttctttgatttccttgtcgtgtaagttattgacatcaaaattctaaaattctattctattctttctcacagatggtgagaacctgtaccgggaggaccgacgatcaggcactcgagccccctgtcagagccgccagaggccagggtcggggtagaggacgaccatgtggtgtagcccgagcacctgcgagagctgcgtcagaggagaacctagcagctccaatttgagggccaaaaccggagatccctattgctactccagccctccaaggagaccttagctcagttcatgagcatgtttggcactctagctcaggatggactatttccgatagctcccgctacatctcaggccgggggaggggcacagactcgcgcaggccgcattcctgagtagagggtccaggatgatcaggccccagagtatattcctatgcccccagttgctccggttcagcatgagattagggtagctgcttatgaggcagagcaacccagacttgagacgtacaagaagtaccacccacctactttcagtggactagcttcagatgatgctctgggttttcttgaggagtgtcatcgtattcttcgcactataggcactgtggagacgagtggggtttctttcaccgctttccagctgaggggagaagcatatcagtggtggcgtgcctatgagctaagtactctggaagaggcaacctcactcacttgggctcagttttcatagatattcttgcataagtatgttcctcagagcctcagggatgcttggcgcgcagagtttgagcagttgcgtcagggtgctatgactgtgtcggagtatgcagtccattttcgtgagttagctcgccatgcaccagctctggttgctacagtcagagagagggttcgtctcttcattgagggactccactccaatatttggaccagtatgtctagggagttggagacggacatcacttatcagcaagcagtgagcattgccaggagagtggagggcatgtttgcccgggacagagaggagagagaggccaaaaggtctcgaaagactgatcattattcaggagctcgtgcaccagtagcacgctatggtaagggttttgtgagtcacccttttcattcagctcttccagcagccagcggtgttccagctcctcctagacctcaggagccctattatgcactaccaatatccagtatgccttttactcgaggtgctattaccggccagtccagcaggccaggtccgagttagtctcagctgccacatcctccgagaggttattttgagtgtggacactcatcacatggttagagatttccccagatccaggtggggtacaccttcatagacttatcagcctccacgtgctccaccgggtcctccggccattcttccagccccagctgcctccccacttcctcagccagctcgaggtggaggtcggggaggtcgaggttgccctagagggggaggccaggccaggtactatgcccttccagcctgttcagaggccgttgcttcagattcagtcatcacaggtatcgtccctgtctgtcaaagggatgcatcagtattatttgacccaggctctacgtattcatatgtgtcttcttattttcctccacatttgggaatatctcgggattctttgagtttttctgtttatatatctactcccgtgggagattctctcattgtggacaacttatatcggtcatgtttgattgctcttagtggttttgagaccagagccgatttgttattactcagtatggtagattttgatgttatcttgggcatggactggttgtcgccccattatgctattcttgattgtcacgctaagaccgtgacggtggctatgccaggcttgctgagattagagtggagaggtaccttagagtatactccccgcagggtcatttcatttcttaaggttcagcgaatggttgagaaggggtgtgatgcgtatttggcctatgtgagagatgtcagtattgatacccctacagttgagtcagttccagtagtgagggacttccccagatgtgtttccagctgatcttccaagcatgccgcccgatagagatattgatttcggcattgatttgttgccgggcactcagcccatatctattcctccttaccatatggcttctcctgagttgaaggagttgaagaaaaagttgcaagagttgcttgataagggtttcatcaggcctagtgtatcaccttagggtgcttcggtcttatttgtgaagaagaaggatggttctatgcgtatgtgtattgattaccggtagttgaacatggttacagtgaagaacaggtatcctttgcctcgcatcgatgatttatttgatcagttacagggtgccagggtgttttccaagattgacttgcattctggctatcaccagttgaagattcgggagccggatatcccgaagactgctttaaggaccagatatggtcactatgagtttcttgtcatgttatttgggatgaccaatgccccagcagcctttatgcatttgatgcacagtgtgttacggccttatcttgattccttcatcattgtgtttgttgacgacatcctggtatattcccagtgtcgggaagatcatgagtagcacctgaggaccgtgcttcagactttgagggagaagaaattgtatgcagaattttctaagtatgaattctggcttgattcagtggcattcttgggccacatagtgtcttgtgataggataaaggtagatctgaagaaggtggaggcagtgcagagttggcctagaccgtcatcagctacggagatccgcagtttccttggtttggcggggtattaccgtcgctttgtggagggattttcatccattgcagcgcctatgaccaggctgacccagaaggatgctccgttcaggtggaccaaggagtgtgaggagagctttcagaagctcaagacatctttgactacaacccgagtattagtattacctacaggttcggggtcctgcactatctattgtgatgcctcgaggattggccttggagcggtattgatgcaggatggtagggtgattgcctatgcgtctagacagttaaaggtgcatgagaagaattgtccggtctatgatcttgagttagcagctattgttcacgccctgaagatctagcgtcattatgtgtacggtgttacttgtgagatctacactgatcaccggagtttgcagcacttgctcaggcagaaggaccttaatttgcgtcagcggaggtggttggagctactnnnnnnnnnnnnnnnnnnnnnnnnnnnnnnnnnnnnnnnnnnnnnnnnnnnnnnnnnnnnnnnnnnnnnnnnnnnnatattactatattgtatcacccggggaaggccattctggcagctgagaggcccttagccttggatgttcatgccttagccagccagttcgtgatattggatatttcagagcctagccgggtattagcttgtgtagttgctcggtcttttatttatgaccgtatcagggagtgccagtatgatgatcttcatcttctagttcttcgggacagggttcgacgaggtgatgccagagatgtgactattggtgatgacggtgtgatgtggattcagagccggatctatgtgcccaatgtagatgggcttcgggagtttattctcgaggaggcccacagctcgcggtactccattcatcccggtgccgcgaagatgtaccaggatttaagacagcactactggcggaggaggatgaaagaggatatagttgggtttgtggccaagtgtctcaattgtcaccaggtcaaatgtgagcaccagagaccgggtggattacttcagaggttagagatcccagagtgaaagtgggagcggagcaccatggactttgtagttggacttccacggactttgagaaagttcgatgctatttgggtatcgtggatcggctgaccaagtcagctcattttattccagtgtcgaccacttattcttctaagaggttggctgagatttatatcagagagactgtccgccttcatggtatcccaatatccatcattcagacagaggtacacagttcacatcacgattttggagagccgtacaacaagagttgggtactagggtggagttgagcacagcctttcaccatcagacagacgggcagtctgagcgcacgacataaattcttgaggatatgctctgtgcctgtgtgatggagttcaaagggtcatgcgaccaatacttgccacttgcagagttcgcttataacaacagttaccagtccagcatttagatggcaccgtatgaggctttgtatggtaggcggtgccggtccccagtaggatggtttgagccaggcgaggcccgattgttgggtacagatttggtccaggatgccctcgataaggtgaaggtgattcaggagagacttcgcacagcccagtctaggcataagagttatgcggaccgtaaggttcatgatttggcatttatggttggtgagcgggtcttgcttcgggtatcgcctatgaagggcgtcatgaggttcgggaagaagggcaaactaagcccgaggttcattggtccttttgagatattgcggcgagttgggaaggttgcttatgagcttgccttgcctcccagcctagcaggagttcacccggaattccacgtgtctatgctccggaagtatcacagtgatccgactcatgtattggatttcagctcagtccagttggacaaggatctatcttatattgaggagccaggagccatttttgacaggcaggtcagaaagctcatgtcaaagaatattgcttcagtaaaggttcagtggagaggtcagccggtcgaggaggcgacttgggagaccgagcaggatatgcacagccaataccctcatcttttcacagtttcagttatgtctttatactcgttcgaggacgaacgattgttttaagggggggaggatgtaacgacccggctagtcgttttgagaatttgagccccgatcccctaatatctgctttccccataattatttctgcttttggaatttgccggagtgtttggttatggaattcgaggagttttgggacacttagtccctagttgtgagtttatgaaaacaagaaatgaatgtttatggaagaaaaataagaagtaaagagggagataaatatactataaccgctcatctgtacaatctcaataaattaaagaaaatgttaaattttaaaatctctaattaataataataaatacacaaattacataatatataagaatagtatattttaaatattaaataaatatagtatgaaatagtattttgggacctcttagaatttggggcctaaggtagtggctttagcagccttacccatcagccgcccatgacctttacacactgtgtgtccgactttgagaaggctgacaagttgaagcaatcacttcctccaggtttgagcgtgcaagacctgtgaagaaggatttatgcttttcatagagttattagggaatgaagaatttgtaagaactcaaatctttccttttaatatcttgccctcaggcatgtctgaagttttatttaaaacttttagatattgattgttgcattagtgtttactcatattgacagtattgtgagtgatccgcaatggtgccgaatgaattttgttagatgccaaagttagtgtttgattttgtcaaaaaagaaaaaatgaaaagtttttatagccatcaccggagagagtatgttttaattgtcatgtatacttatggcgagtggttttaacgcgaaagacattaacgtctagtatttttataatggggcataatcatctgagtatttttatactctgtctagtactgttttgtgcaacaatcataaagaggtagtaataaagaacaatgataatatacatcagaatgacaaagagacgatcatttctgaaatattcggatccattttagatcaagaagatctttattgccaccttcataatggaaatattttagcgtatcttagcttgacatgtcgtatattcttttggtgataaaatgagctgcgaaatttgttaaaaggacaagcttgccagatctcttttaaattagcacttgcatttctgtatcagctcttcacggtttccagtatatataaatccttcttatatttaatttgacagctcattttcaccaaaaagacaaaagtaaaaatacaaataaaccaatctctgggcctgtatttcaaataaaatacgtttctgctcgggattcaatagattatgtgaacgtgtaaagatcttcctctaggtctaaaatggatctgcattcaatagtgttgtagtacttttgtcgcacttcatgtatatattcacattcacatcgaagtgtattttttaactctttttaatatatgagcaaccattcgtttcttaatgggatatacgagtgctcgttccatttttatataataaaacttaaaaggcataacaagcagctacttagaatggaaacttcacacaaactcttattcatttcttcatttatttatgtgatacactttccgtactactccattctaaaaagaatgatatatcttcctctcaaatatattatctattgtaatttttaaaaatagttgtctcaaattatttatcattttagaatttcaagataaaattaattatatcttctcaattttacccttaatagtaattgttcttgaaaatagagatagcacataaatagactaaatattaaatgaaaagagaatacatcttaagacataaataagagtaaaatagttaaaatctctttccaattaatgatttcttaagggacgtgtaaaagaaatacacgacagataatttaagccgaagagaatacatttctatattttaattaaaaactttttatttaaaagtttttaaaacgatacaaattgaaagtcccacaaaagttttactcagataaccttcttatacaacataattaatgagaaacaggaagatacgatctagtgctgcgtgcaatagggcaaagcatatataaatagatgtgggtgtcaaccttttcattcatcctccacaatatataagataaaaggagcaagaaactatatatattcattttcatccaaaaccttattagggcaatggaaatgaatctagctgacgaaaccttgtttttctctgagtctcatctccttgaatcgataaagcaacatcttcttgatgattcagatttttctgaaattttttcgccgatgagttcaagcaacgaaatattgcctaacagtcctagctcaagttttagcagcttcgactgcagcttcctcaattgggatgaaaactttgaggaaacattaataccaactgatcaaaatccttcacatgagaagtgctccgagtccgaggagcaaacccagggcccagcggtggtgcgtgagaaaaacgcgccgcgagattggacgcggtatataggagtgaaacggcggccgtgggggacgttttcggcggagacaagagacccaagtaggaaaggtgaaggtgcaaggctgtggttaggaacttacgagaccgcagaggatgcannnnnnnnnnnnnnnnnnnnnnnnnnnnnnnnnnnnnnnnnnnnnnnnnnnnnnnnnnnnnnnnnnnnnnnnnnnnnnnnnnnnnnnnnnnnnnnnnnnnnnnnnnnnnnnnnnnnnnnnnnnnnnnnnnnnnnnnnnnnnnnnnnnnnnnnnnnnnnnnnnnnnnnnnnnnnnnnnnnnnnnnnnnnnnnnnnnnnnnnnnnnnnnnnnnnnnnnnnnnnnnnnnnnnnnnnnnnnnnnnnnnnnnnnnnnnnnnnnnnnnnnnnnnnnnnnnnnnnnnnnnnnnnnnnnnnnnnnnnnnnnnnnnnnnnnnnnnnnnnnnnnnnnnnnnnnnnnnnnnnnnnnnnnnnnnnnnnnnnnnnnnnnnnnnnnnnnnnnnnnnnnnnnnnnnnnnnnnnnnnnnnnnnnnnnnnnnnnnnnnnnnnnnnnnnnnnnnnnnnnnnnnnnnnnnnnnnnnnnnnnnnnnnnnnnnnnnnnnnnnnnnnnnnnnnnnnnnnnnnnnnnnnnnnnnnnnnnnnnnnnnnnnnnnnnnnnnnnnnnnnnnnnnnnnnnnnnnnnnnnnnnnnnnnnnnnnnnnnnnnnnnnnnnnnnnnnnnnnnnnnnnnnnnnnnnnnnnnnnnnnnnnnnnnnnnnnnnnnnnnnnnnnnnnnnnnnnnnnnnnnnnnnnnnnnnnnnnnnnnnnnnnnnnnnnnnnnnnnnnnnnnnnnnnnnnnnnnnnnnnnnnnnnnnnnnnnnnnnnnnnnnnnnnnnnnnnnnnnnnnnnnnnnnnnnnnnnnnnnnnnnnnnnnnnnnnnnnnnnnnnnnnnnnnnnnnnnnnnnnnnnnnnnnnnnnnnnnnnnnnnnnnnnnnnnnnnnnnnnnnnnnnnnnnnnnnnnnnnnnnnnnnnnnnnnnnnnnnnnnnnnnnnnnnnnnnnnnnnnnnnnnnnnnnnnnnnnnnnnnnnnnnnnnnnnnnnnnnnnnnnnnnnnnnnnnnnnnnnnnnnnnnnnnnnnnnnnnnnnnnnnnnnnnnnnnnnnnnnnnnnnnnnnnnnnnnnnnnnnnnnnnnnnnnnnnnnnnnnnnnnnnnnnnnnnnnnnnnnnnnnnnnnnngcgttggcttacgatcaagccgctttcaaaatccgcggctcgagagctcggctcaattttccccacttaattggctcaaacatgcctaagccggctagagtaacagcgaggcgtagtcgtacgcgctcacccgagccatcctcttcttcatccacttcatcatcagaaaatgtgccaagaaaaaggaatatagatgtgataaattccatagccaaagccaaattcctttgtcatagcttaaatttacagagattagcttaactatgtgaaaggaaggaagctttcattcgttcaacattagaatagtctctaaaaaaatgagggcaacaaaaattttagttaatttctccattctcttttgttgccattcttataatgaaattgcttggaagataaatcacgttttgttctatcagtgtatatgcacttcattcaaatagacctccagctttcatattttttctatgttgatcataagtgagactagtgaaaaaaacagacaagttaaaaagtctaaatttgtccctaaactttcactccatcacatcgacctccctcgtagtttaagatattacacttacctctcttattttgagtttctagtaaacattctttttaacctaattatttttaattatataaaattgtaatacgataaattttccgtctaaatttggaaacatcttttctgaaaaaaaatctacaataaaacaactgactgaataaaataaaagaacatagtgtttgaaaattagtccgtctttttcggtggtgtataagatcggaggttgtggtagttagggcggttaaaaatcgaactgaaaccgttaagcgaatcgaatcaataacttattggcttattggtatcagattatcggagtaatggatggtgaacaaattaagattttataattaatggcttaacgattttggggcggattactcaattttcttatcgggtaaatcattaacccgttaagaatttttatatttatacttttacccctatgtatataaagtattattgaaaccttaaatggttaaatccctaatttctattttttaattctcaattgtctgcagccactagaggcagagaagtcgccagtcacgtctctcttgaactgaaaactgagaagtcaaaaaatcgaaatcacaatgattaatatgtgtatgtctgtatgagtagtcttgatggtattacaaatttggttaatacgtgtgtaaatgtatgagtagttttgaaaactcttcaattaaaaaatactgttttgttagatcttatatggtattaaaaatttggtattgatttgaaactgattggtattgattgaatgattgttcaaaaaaattctatttggtttagccgataagtcacctgatatccgcccgataattgttaatctggtataaatccgcatgttgtcttattggatggctagcggattactacatttataatccgataaccgttaagtttaattattcgcccgatccgcccgataaacatccctagtgggagcaagggcggatgcaacatagagctattgggtttaacagaactcattacttttgatcagaacataaatttatgtgtaaatattattaaacttaccaaaaatagtagatatgaatgaatccataactttaaaatataatgggtcaaatactaaaaatattaaatgttgaacccacaaaattaaatcttagatttggatatgaataagaaccctaaaagacttcccatgataattagatatgtaactggacaaatccctaaagatgtctattgcgaatgaaagagtacaaggtagttggtcagctgttgaaggaaagatttagagatccttctccgattacagctactatgcaatagcaggttgacagatgtcaatcgtttcaatcaagcaaaccttcagcagtttatgcaatatgaaagggcaattttgtcatatcagagtttttaaattctataataaataggtaaaaaatattactattacaaaagaaattaaaataagggagaaaagcgtaatatctcacactaaaaggaaagtcaagatgataaaaaaataagtttattggtcatccaaaaacaataccatcgtatttttcttaaaatccgtatctcttggttaatagtttcataaaacatacttttaccaaattaactttgtatccttcccccggtaatttaaaccaatccttcacagctagatttaaaattgtaaattcctctatgagaagagtatatgtagatataggaatgcctaatgtaacttacaaggtttatcttactgacacgtggtaacaaagctcaagcttcttatgtatacaatgattaaaattaagcatcctagtaggattacattaaaagcaatgaatctcttattagttattcataaaagatggggtcgtttggtttaaatacggcttatgccgggataagttatgctggaattagttatcctaatattattttttatccattatctggtatattttattaaaaatgataactgcataatttctaagaagaatgaataagttatctcgacactaattaccccaccctctacaaggtataagttatcccgatactaattttaatctcgggataacttataccaggtttttgtaacgactcggccggtaatttcgagagttgtagccccgttcccccatttactgctccatttatgctttatagttgttatatgacttatcgggttagttggttagagtccggagtgaattcagtgtgaaatgagacacttagtctcttaaatggaaaacttaagttggaaaagtcgtccggatgttgatctatgtgtaaacgacctcagattcgaattctgatgattccagtagcttcgtatggtaattttgaacttagaagcgtatccgaaaaattatttggaagtctgtagtgggattagacttgaaatggcgaaagtcaaattttgaaaagtatgaccgaggggttgactttttttatatcggggtcggatttcaattccggaagctgcagtaggttcgtggggtcatttatgacttgtgtgcaaaatttgaggttaatcggacgtgatttgataggttttggcgtcgtttgtagaattttgaaatttcaaagtttcttaggcctgaatccgtgtgtaattcgtgttttcgatatttgttggaggtgatttggttaaggtactaggggcctcgggttgatttcgggtggttaacgtacttggaatttgatttgagaagttactgaagtgtaagagttgctggtgtgaccgcacctacggagaagggaccgcagatgcgatcccgcaggtgcggaaaggggtggagaccagtaggggctgcaggcgcgatggtttctccgcacctgcgataacacagatgcggaccattggtcgcgggagcggaggcagccagagttagtcattttcacaggtgcgcccagatgttttgcaccaacgggcgtgcaggtgtggaaatgcctgggcagaatctatatcagcgggatccgtgttttttgtccatgtctaacattttttagctcgaaatttggaggtttggaaagggtttttcaaggggattctttgggtaagttccttgtgtttatttttattcaataattatatttccccacggagtttgcacttagatggtgtgtttttgaggtataaatttgggatttgaggctagggatttggagagttggttttgaggatttgaatgaccaattggtgttggattttgatgaatttggtatggttagactcgtgagtgaatgagcttttggattttgtgacttttgtcagatttcgagatatgggcccgtgggccgggtttgggccgatttcatattttggctataatgtcatttttttcttgtggaattaattcctttagcctatattgattgttttatactatatgtagctagattcgggacgtttacggatttgagagacaagggcattttggagtagaatttagcccgaattgagatagtaacacattcaaacttagttctaagggttcgaaacaccgaattatgtgttatgtgcttggtattgaggtgacgcacatgccaagtgacgggcgtgcaccattagaactgtgacctggttgactccatggcaccgtatagtggttttatcttgttgatacctgtgtattcatcatgtgataaagtaattgagctgtcactcgtgctagatatcatgtttaggatttatgttggtactgtttggaccacagtggtcgtttcttgttgttgtcttactgatttcattgatatttcatacttagtcatattcattcattttatatctcatcgcaatctcttttgttattaattgatgcatcatatcattattttcgggcaagtatcatgacattgtgagcccatgagagagagactggagagattgatgactgagtgaggccgagtgcttgagtatgagtggtatttatgggatcagactacacgccgcaatggttatactaatttatgatagcgcttgggatgaaggatcccctccggagtctgcacacacccctagtgagcgcggttgatattatatggagatggatcttctccacatggctagattggccttcctcggtactaggtgacttatattgagtgatgtatatgttctgggatggaccttccctgagccgtattagccatatacagtaccaagtggttgattatttgagagtgtgaacctggagatggatcttctccacagggctgaattggccttcctcggtactgggtgacttatagtcattgatgtatatgttccaggatggatcttccctgggccgtatgggccaaatacagtatcgggtggttgagtattcgagagtgtgagcacatgaggctgtcagcatggtgcatcacatacaacattgcattggcatggtagaggttgaggagttatatttttcatnnnnnnnnnnnnnnnnnnnnnnnnnnnnnnnnnnnnnnnnnnnnnnnnnnnnnnnnnnnnnnnnnnnnnnnnnnnnnnnnnnnnnnnnnnnnnnnnnnnnnnnnnnnnnnnnnnnnnnnnnnnnnnnnnnnnnnnnnnnnnnnnnnnnnnnnnnnnnnnnnnnnnnnnnnnnnnnnnnnnnnnnnnnnnnnnnnnnnnnnnnnnnnnnnnnnnnnnnnnnnnnnnnnnnnnnnnnnnnnnnnnnnnnnnnnnnnnnnnnnnnnnnnnnnnnnnnnnnnnnnnnnnnnnnnnnnnnnnnnnnnnnnnnnnnnnnnnnnnnnnnnnnnnnnnnnnnnnnnnnnnnnnnnnnnnnnnnnnnnnnnnnnnnnnnnnnnnnnnnnnnnnnnnnnnnnnnnnnnnnnnnnnnnnnnnnnnnnnnnnnnnnnnnnnnnnnnnnnnnnnnnnnnnnnnnnnnnnnnnnnnnnnnnnnnnnnnnnnnnnnnnnnnnnnnnnnnnnnnnnnnnnnnnnnnnnnnnnnnnnnnnnnnnnnnnnnnnnnnnnnnnnnnnnnnnnnnnnnnnnnnnnnnnnnnnnnnnnnnnnnnnnatattgatccattttactgttttaagatatctaccgaacttgaaagcatgtctatatttcttcactgttattttctgttttgaactgtgccggttgagttcgtaactactttcagcccacaatttgggtttgttacttacttagttggttgtactcacactacactctgtacctcatgtgcagatctaggaacttctggttacggcggctactgattgaggagataggatctcggagactatcgaggtagccgtatagcattcgcaaggccttgactctacttcattatcttcatctatacttcagtttttactccttagacattgtagtagactgtattctgacatagatgctcatgtactcagtgacaacccaattttgggatggattgtattatattttggatatttctgtttttaaaaggttttttccttaactattaaattgttttcgcctatattttgaagcttttactgtgttgagatagttgagtagcggcttgcctagtaccatgataggcgccatcacgacggttggttttttaggtcgtgacaagttggtatcagagcctagattatataggtctcacgagtcatgagcaggtttagtagaggcttgcggatcggtactgagacgtctgtacttatcttcgagaggctgccgaacccttaggaaaattacaatttcttgtactctatcgtgcaaatttgttgataacgaaaactgaatttatgttattctattctctcacagatggtgagaacatgtactacttggcaggatggacagtcaccagtaccaccagctagggctgcgagtggtcgaggtcacaatagaggtcgcgataggggcaaaggtacaactagggcagcacctgcagacccaccagttgctctagctcaggcaccagctgtgcctattgcgattgcaggcattcaggagactttggcccagatattggcagcctgcactggtcttgctcaggtggtttcggctcaggccgcacctgccactnnnnnnnnnnnnnnnnnnnnnnnnnnnnnnnnnnnnnnnnnnnnnnnnnnnnnnnnnnnnnnnnnnnnnnnnnnnnnnnnnnnnnnnnnnnnnnnnnnnnnnnnnnnnnnnnnnnnnnnnnnnnnnnnnnnnnnnnnnnnnnnnnnnnnnnnnnnnnnnnnnnnnnnnnnnnnnnnnnnnnnnnnnnnnnnnnnnnnnnnnnnnnnnnnnnnnnnnnnnnnnnnnnnnnnnnnnaccagcccagccggttgcagctactcaggccctagtagttcctgttatggcagacgatgatcagaggagatttgagagtcttcggcctccaccatttagaggtactgagtcagagaatgcttaggagtttttggataggtgccaaccgatgcttcggacaacaggtattctggagaccagtggggtctcattcactacttttcagtcttatggggctgcactcagatggtgggagacttacgagagacgtaggcctgttggcgcaacaccccttacttggcatcagttctccgtggtctttttggagannnnnnnnnnnnnnnnnnnnnnnnnnnnnnnnnnnnnnnnnnnnnnnnnnnnnnnnnnnnnnnnnnnnnnnnnnnnnnnnnnnnnnnnnnnnnnnnnnnnnnnnnnnnnnnnnntcctcagtcccacagagaagagctgcgcagacagttcgagcagcttcgccagggtgatatgtctgtgacgcggtacgagatgagattttctgagttgcctcatcacgctgtctggttggttcctactgatagggagagggttaggagattcattgatggcctcacatatcaactgcgattacttatgactagggagagagtatctggtgctacttttgatgaggtagtggacattgctcgacagatagagatggtttgtagccaggaacgtagagagagagagagaggctaagtggcctcgtggtccatgtgattacagcgatgttccttcaaggggtcaatttcaccaaggtaggggtcgttcttatagacatgctcaaacgggtcatccagctcatcgtggtgcatcagctagccatggttcttacagtgctcactcaggccagtattcattcagtgcactaccagcgcagagttctcatcatgcctcgtccgcacaagattctgcaggtcattcctcgagttataaggagcaacagtttcatcagagaaggggttgtttcgagtgcgtagaatttggtcatttcaagagagagtgtcctaggctgttgagtggggcttcacagcagatttctcgaccgacagcaccagcaccagcagttacaccacccaccctaccatctcggggtgggggtcaggcagctaggggtcgctcaagagggggaggccgatcaggtggcgggtaagctcgattctatggttttcctgccaggacagatgttgttgcctccgacgcggtgatcacaggtattgtttcagtatgccacagggaggcttctatattatttgaccctggttccacttattcatgtgtatcatcgtatttttctcattatttggatatgtcgtgtgtgtccctagtttcacctatttgtgtatctacactggtgggcgatattattactgtggatcatgtgtatcagtcgtgtgtagtaactattagggaactggagactagagttgatctcttattactcagtatggttgattttgatgtaatcctgggtatggattggctatctccatatcatgctattctggactgtcacataacaatcgtgacgttgacaatgccggggttgccaaaggttgaatggaagggttctctagatcttgtgggataatactgggtatgttgttgttgttgtacaattttaaaagcatccctgtgatttttaaactagattatcaatttttacactttcatgtccttctaagtgatgggaccccctgttgagtttggaagatcctcttgttatgagataatggtcatcgaaatgtcaagcattcgaaaggtggatgcgtctacccggagactcagtcaaccttatttatagatcatggatatcaacgttatgctggaacggttgctactatcgaagatcttgctcctactagctaatcacctggtatactggctcaaaactcggaacgatagctttcccctaccattataaaggcctccctaacgctctaaggaaagggcatcagaaaatagaatgataagttatgcgtcttttgttttgataatttgacaaacttcatgagagaaccagataagcaacctgatacattgaaggcccaacatatggttggaaagggatgcttgtcatatttggcctttgtaagagatgttgatgcagatactcctattattgattcaataccgatcgtacgagactttccggatgtattttctgcagacctgctgggtatgccactcgacagggatattgatttcgggattgacttggtacagggcactcaaccaatttctattcctctgtatcgtatggaaccagttgagttaaaagaattgaaagagcaacttcaggaactccttgaaaaagggtttattaggcctagtgtgtcgccttggggtgcaccggttctgtttttgaaaaagaaagatggtactatctggatgtgcattaattataggcagttgaacaaagttacaatcaagaataaatatccattgccgcgtattgatgatttatttgaccagcttcagggagcgagggtgttctccaaaattgatttgaggtctgggtatcaccaattaaaaattcgggattcggatattctaaagacgacattcaggactcgttatggccactatgaatttcttgtgatgtcttttgggctaaccaatgccccagcagcatttatgcatttgttgaatagtgtatttcagccatatcttgatttatttgtcgtaatattcattgatgatattcttgtgtactcacgtagccaggaggagcatgcaaaacacttgggaattgtattacagaggctaagagaggagaaactttatgccaaattctctaagtgtgagttctggcttagttcggtagcattcttgggacatatagtgtccagtaaaggaattaaggtggatccgaagaaaatagaggcagttcagaattggcccaaaccatcctcagttactgagattcagtgttttctcggcttgatcggttattatcatcgtttcgtggagggtttctcgtctattgcatcgcctatgactaaatagacccaaaaaggtgttccgttcaggtggttagatgaatgtgaagagagctttcagaagctcaagatagctttgactacaactccagtattggtattgcctacaggttcagagtcttatactatgtattgtgacacgtcgcggattcgtctcggtgcagtacttatgcaagacggtagggtgattgcatatgcgtccagaaagttaaaggtacatgagaagaattatccagtctacgatcttgagttagcagctattgttcatgccttgaaaatttggcggcattacttgtacggtgtccagtgtgaggtatataccgatcatcggagtctacaacatttgtttaaccagaaggatcttaacttgcggcagcgaaggtggttggagttgcttaaggattatgatatcaccattctctatcatcctggaaaggccaatgtggtggccgatgccttgagtcgtaaggcaaagagtttgggcagcttaacatacttaccggtagtagagaggcctttagccttggaggttcaggccttggctaatcagtttgttaaattggatgtttccaagccgaatcgagttttggccagtgtagtttctcggtcttctttatatgatcgcatcagagagcgccattatgatggtccatatctgcttgttcttaaggacacagttcagcacggtaatgccaaagaagtaactattggagatgacggtgtattacggatacagggcaggctacatgtacctaatgtagatggttttcctgaactgattctccaggaagctcatagttcgcggtactctattcattcaggcgtcgcgaagaggtataaggatttgagacagcactattggtggaggcggatgaagaaagatatagttgggttttgtatctcggtgtttaaattgtcaacaggtaaagtacgagcatcagagaccgggtagattactacagagacttgaaattccggagtggaagtgggagcgtattaccatggacttcgtagttggactcccacagactttgagaaagtttgatgnnnnnnnnnnnnnnnnnnnnnnnnnnnnnnnnnnnnnnnnnnnnnnnnnnnnnnnnnnnnnnnnnnnnnnnnnnnnnnnnnnnnnnnnnnnnnnnnnnnnnnnnnnnnnnnnnnnnnnnnnnnnnnnnntggttgaccaaatctgcacattttattccagtcggtactaattattctttagagcagttggctgagatttatattcgcgagattgttcacgtagtttacctcgaagttttggagggcagtgcagcgagaattgggcacacaggttcagttgagtacaacatttcaccctcagatggacggacagtccgagcgcactattcagatattggaggatatgctacgcgcttgtgtcattgattttgggggttcatgggatcaatttctgccactggcagagtttgcttacaataatagctaccagacaagcattcagatggctccgtatgaagctttatatgggagacggtgtcggtctccggtgggttggtttgagcctggtgaggttagactattaggtactgacttggttcaggatgctttagagaaggtcaaggtaattcaggaacagcttcacacggcatagtctagacagaagagttatgccgacaggaaggttcgtgatgttgttcacatggttggggagaaggttctgctcaatatttcacccatgaagggtgtgttgaggttcgggtaaaaagggcaagttgagcccgcggtatattgggccttttgagatacttaagaaaattagggaggtggcttatgaacttgctttgccacctagtctatcaagtgttcatccagtgttccatgtatccatgctccgaaagtatatcggggatccgtctcacattctggatttcagtgtagtacagctagacggtaatttgacttatgatgtggagccggtggctattttagaccggaaggttcgaaagctgaggtcaaagaatataacatcagtgaaggtgcagtggagaggccagcgagtcggagaagctacttgggagattaagcaggaaatgcagaacaaatatccacacttatttgagactccagttattattctaaacccgttcgaggacgaacgtttgtttaagagggggagaatgtaacgacccagccagtcgttttgagtattataaccccattcccccatttactgctcaatttatgtcttgcaattgatttatgacttatcaggttagttggttcgggtacggaaggaattcagaacgaaatgagacacttagtctcataattgaaaatttaaattagaaaaagtggaccggatatggacctatgtgtaaaggacctcggattcaaattttgatgattccagtagctctgtatggtgattttggacttaggagtgtgtccgaaaatatttttggaggtccgtagaggaattagacttgaaatgccgaaagttgaatttttgggaagtttgaccgaggggctgactttttgatatcgaggtcgaaatccgattctgaaaattttaataggtatgttatgtcatttatgacttgtgtgcaaaattggaggtcaatcggacgtgatttgataggtttcggcattatttgtagaaattagaaatttcaaagttcaataggcttgaattggggcgtaattcccgaacctcaacacacccttcatgggtgaaatcttgagcagaaccttctccccaaccatgtgaacaacatcacgaaccttcctgtcggcataactcttctgtctagactgtgccgtgcgaagccgttcctgaatcactttgaccttctctaaagcatcctgaaccaagtcagtacccaatagtctaacctcacccggctcaaaccaacccaccggagaccgacaccgtctcccatataaagcttcatacggagccatctgaatgcttgactggtagctattattgtaagcaaactctgcgagtggcagaaattgatcccaagaacccccaaaatcaatgacacaagcgcgtagcatatcctccaatatctgaatagtgcgctcggactgtccgtccgtctgagggtgaaatgttgtactcaactgaacctgtgtgcccaattctcgctgcactgccctccaaaactgtgaggtaaactgcgtaccccgatctgaaataatggacaccggcacaccgtgtaggcgaacaatctcgcgaatataaatcccagccaaccgctccgaagaataattagtaccaactggaataaaatgcgcagatttggtcaaccgatctactatcacccaaacaacatcaaactttctcaaagtccgtgggagtccaactacgaagtccatggtaatacgctcccacttccactccggaatttcaagtctctgtagcaatccgcccggtctctgatgctcgtactttacctgttgacaatttaaacaccgagatacaaacccaactatatctttcttcatccgcctccaccaatagtgctgcctcaaatcctgatacatcttcgcggcgcctggatgaatagagtaccgcgaactgtgagcttcctggagaatcagctcacgcaaaccatctacattaggcacacatagcctgccctgcatccgtaatacaccgtcatctccaatagtgacttccttggcatcaccgtgctgaaccgtgtccttaaggacaagcagatgtggatcatcatactggcgctctctgatgcgatcatataaagaagaccgagaaaccacacagccaaaactcgattcggctcggaaacatccaatctaacaaactgattagccaaggcctgaacatccaaggctaaaggcctctctgctaccggtaagtatgctaagctgcccaaactctccgccttacgactcaaggcatcggccaccacattggcctttccgggatgatagagaatggtgatatcataatccttaagcaactccaaccaccttcgctgccgcaaattaagatccttctgtttaaacaaatgttgtagactccgatgatcggtatatacctcacactggacaccgtacaagtaatgccgccaaattttcaaggcatgaacaatagctgctaactcaagatcgtggactggataattcttctcatgtacctttaactgtctggacgcataggcaatcaccctaccgtcttgcataagcactgcgccgagaccaatacgcgacgcgtcacaatacacagtataagactctgaacctgtaggcaacaccaatactggagttgtagtcaaagctgtcttgagcttctgaaagctctcttcacattcatccgaccacctgaacggagcacctttctgggtcaatttagtcataggcgatgcaatagacgagaaaccctccacgaaacgacgataataaccggccaagccgagaaaactccgaatctcagtaactgaagatggtctgggccaattctgaactgcctctattttcttcggatccaccttaattccttcactggacactatatgtcccaagaatgccaccgaactaagccagaactcacacttagagaatttggcataaagtttctcctctctcagcctctgtaatacaatacccaagtgttgtgcatgctcctcctggctacgtgagtacaccagaatatcatcaataaataccacgacaaataaatcaagatatggctgaaatacactattcatcaaatgcataaatgctgctggggcattggttagcccaaaagacatcacaagaaattcatagtggccataacgagtctgaatgccgtctttagaatatccgaatcccgaatttttaactggtgatacccagactcaaatcaattttggagaacaccctcgctccctgaagctggtcaaataaatcatcaatacgcggcaatggatatttattcttgattgtaactttgttcaactgcctataatcaatgcacatccgcatagtaccatctttctttttcacaaacagaaccggtgcaccccaaggtgacacactaggcctaataaaccccttttcaaggagttcctgaagttgctctttcaattcttttaactcagctggtgccatacgatacggaggaatagaaatgggctgagtgccctgcaccaagtcaataccgaaatcaatatccctgtcgggtggcatacccggcaggtctgcaggaaatacatccgaaagtctcgcacgaccggtactgaatcaataataggagtatctgcatcaacatctctcacaaaggccaaatatgacaagcatccctttccaaccatacgttgggccttcaaataagaaattaccctgctaggaacaagatctagagaaccctccattcaacctttggcaaccccggcatcgtcaacgtcacgatttttgcgtgacagtccagaatagcatgacatggagacaaccaatccatacccaggattacatcgaaatcaaccataccgagtaataagagatcaactctagtctccagttccccaatagttaccacacacgaccgatacacacgatccacagtaataatatcgcccaccggtgtagatacacaaacaggtgaaactaaggactcacagggcatatccagataatgagcaaaatacgatgatacatatgaataagtggaaccagggtcaaataatatagaagcctccctgtggcacactgaaacaatacctgtgatcactgcatctgaggcaacaacatctggcctggcaggaaaagcatagaatcgagcctgcccgcctgatcggcctccccctcttgggcgacccctagctgcctgaccccccccgagatggctgggcgggtggtgtaactgctggtgctggtgccgtcggtcgagaactctgctgtgaagccccactcaacagcctaggacactctctcttgaaatgaccaaattctccgcactcgaaacaacccctcctctgacggaactgctgctcctgataacccgaggaatgacctgcagaagcctgtgcggacgaggcatgatgagaactctgcgctggtagtgcactgaatgaagactggcctgagtgagcactgtaagaaccatggctagctgatgcaccacgatgagctggacgacccgtctgagcgtgtctgtaagaacgacccctaccacggtgaaactgaccccctgaaggaacaccgcgtaatcacccggaccacgaggcctcttagcctctctctctctccacgttcctggctacgaaccatctctatctgccgagcaatgtccactacctcatcaaaagtagcaccagatactctctccctagtcataagtaaccgcagctgatatgtgaggccatcaatgaacctcctaatcctctccctatcagtgggaaccaaccagactgcgtgacgagccaactcagaaaatctcatctcgtaccgcgtcacggacatatcaccctggcgaagctgctcaaactgtctgcgcagctcttctctgcgggactgaggtacgaacttctccaaaaagaccacggagaactgatgccaagtaaggggtgctgcgccaacaggcctacgtctctcgtaagtctcccaccatctgagtgcagcccagaaaactgaaaagtagtgaatgagaccccactggtctccagaatacccgctgtccgaagcatccgttgacacctatccagaaaatcctgagcatcctctgactcagtaccgctaaatggtggaggtcgaagcctctcaaatctctcaagtctcctctgctcatcatctgccataacaggaactaccggggcctgagcagctgcaaccggctgggctggtagtgcccccggtatctgaagtccctgtactacctggtctggagtacgggcaacaggggtatgagtacctcccccagcctgagaagtggcaggtgcggcctgagccgaaaccacctgagcaagaccagtgcaggctgccaatatctgggccaaagtctcctgaatgcctgcaatctcaatgggcacagctggtgcctgagctgatcctgtcggctcaactatatctggaatctgctcctgagctggaacaactggtggtactacaggtgctgttccaactgtggtacgagctacacctcgacctctacctcggccccggcctctaccacggccccggcctctcgcggccctaactggtggcactggtggctgaccgtccgatccggtagtacgtgtcctcaccatctgtgagagaatagaatagcagaaatttagtttccagaatcaacaaattcgcacgacagaatacaagaaagtgaaattttcctaagggttctgcagcctctcgaagataagtacagacgtctccgtaccgatccgcaagactctactaaacctgctcatgactcgtgagacctatgtaacctaggctctgataccaacttgtcacgacccaaaatcccaacctgtcgtgatggcgcctatctcgatactaggcaagccgataatctcaataaaccacaatttctctttaagtttgaaaatataatatttaaatacaatacaaacactcccaaaacctggtgtcactgagtacatgagcatctaatatgaatacaagtctggaaaatatagtctataatagtctgagaccaaatacagtaaacaaagagatagagaaggagagacaaggtctgcggaacacggcagctacctcaaaatctcctgaaaatcaaccgcgcgaaaggatcaacacccgctatgtccgggaacacctggatctgcacacgaagtgcagggtgtagtatgagtacaaccaactcagcaagtaacaataataaataaggaactgaagatagtaacgagctacacagttatggttcatttccagtaattccagcaaagaatagacatgctatcaaatctggcagtttaatgtcaaatcaatttttatacagttcctgttcatgtaatccgtatatcaacaatctttcagagatttcacaacaatgacagatagcaactaagtgcaacaacaaatggaaatcaagtacaacctcttaggacaacaatcactcactgggctcccagccctcatcactccctgggctcccagccctcatcactcactctcaatgggtacccgcgctcactgggggtgtacagactccggaggggctcctacagcccaagcgctataatctgcacggacaactcacgtgccataatataaatatctggttcacacggccaactcacgtgctatagtataatataaggatccacggccaactcacgtgctgcacggacaactcacgtgctatatatcaatatctcacaatcaggccctcggcctcactcagtcataaatctctccagtctctcgggctctcaataatcatgaaatcagcccaaacaacaatgatatgatgtatcaataataataacagagactgagataaaatgtgcaagtaaaaactgagactgagtacatatagcatttagcaggcaattcaacaagtacgcgacctctgtgggtcccaacagtactatcacatagcctaagcatgatttctaacatgatttacagtcaaattttatcaacacatagagagcatatagctaacaacaaattattcaactttacagtttcccgggacggaccaagtcacaatcccctcggtgcacgcccacacgcccgtcacctagcatgtgcgtcacctccaaaataatcacatgataccaaaatccggggtttaataccctcaggaccagatttaaaactgttacttacctcaaaacgtgaaattctttactctgctatgcctttgcctcgcaaatcggcctccgaatgcctcgaatctagtcacaaataattcgtttcagtcaataaaatttattggaattaattccataagaaaatactaatttttcataaaaatccgaaatttagctcaaaaatcgcccgtggggcccacgtctcggaacccgacaaaagttacaaaatcgaaagcccattcaaccacgagtctacccataccaattttaccaaaatccgacctcaactcgaccctcaaatctacaaatcttatttccaaatttctaagttccaatctccgatttacacctcaaaatcatgtaatctagtcggattattcgatgataattcaatattatggagtagaaatgatcacaagggacttacctcaagttttccttgaaaatatatcaaaaatcgcctctcctcaagctccaatttgtcaaaaatggcgaatgggacgaagtccctgtttttataattctgcccagacaacctcggttctgcctcgatcttggccttcgatcgaggtcctcgatcctcgatcctggcctcgatcctggcctcgatcctaggcctcgatcctgatcctcctcgatcgtggcttcgatcctgatcctcgatcatggccctcgaccctggccttcgatcatgtcttcgaccctgccttcgaccgtgaccctcgaccctgggctcgatcatggcttcgatcccttgggctcgatcatggccctcgatgacttgttgttatatttggttgaggtcccgggatcctcaggtgagtttcgtatggttaacggatcaaaaattgaactacaacagctgctgcaatttccttatgttggaaatttcttctgccagattcgagcccagaaatctctcagaatcgagcccaggacctgctagaatcgagcccagggtcgagggccacgatcgaagccatgaccaaggccagggtcgagggccacggtcgaaggcatgatcgaaggccagggtcgagggccatgatcaaggatcaggagtgaagccacgatcgaggcccaggatcgagggccaggatcaaggaccaggatcgaggcccaggatcgaggcccaagatcgaggcctaggatcgaggaccttgatcgaaggccaagatcgaggcagaaccgaggttgtctgggcagaattataaaaacaaggacttcgtcccattcgccatttttgacaaattggagcttgaggagaggcgatttttgatatattttcaaggaaaaattgaggtaagtcccctgtgactactccataatattgaattatcatcgaataatccgactagattacatgattttgaggtgtaaatcggagattggaacttagaaatttggcaataagatttgtagacttgagggtccaattgaggtcagaatttggtaatattggtatgggtagacacgtggttgaatgggctttcggattttataacttttgtcgaggtctgaaacgtgggccctacgggcgatttttgagctaaaattcgaaattttatgaaaaattagcattttcttatggaattaattccaataaattttattgactgaaacgaattatttgtgactagattcgaggcattcggaggccgatttgcgaagcaaaggcatatcagagtaaagaatttcacgttttgaggtaagtaacagttttaaatctggtcctgagggtattaaaccccagattttggtatcatgtgattattttggaggtgacgcacatgctaggtgacgggcgtgtgggcgtgcaccgagggaattgtgacttggtccatcccaggaaactgtaaagttgaataatttgttcttagttatatactctctatgtgttgataaaatttgactgtaaatcatgttagaaatcatgcttaggctatgtgatagtattgttggggacccacagaggtcgtgtacttgttgaattgcctgctaaatgctatatgtactcagtctcagtttttacttgcatattttatctcagtctctgttattattattgatannnnnnnnnnnnnnnnnnnnnnnnnnnnnnnnnnnnnnnnnnnnnnnnnnnnnnnnnnnnnngggctgattttatgattaatgagaacccgagagactagagagatttatgactgagagaggccgagggcctgatattgagatagtaatatcatagaacgtgagttgtccgtgcaacatgtgagttggctgtgcagatccttatattatactatagcacgtgatttggccgtgcagcacgtgagttggccatgcggatccagatatttatactatagcacatgagttggctgtgcggatccagatatttgtattatagcacgtgtgttgtccgtgcagattatagctcttatgctgtaggtgcccctccggagtctgtacacccccagtgagcgcgggtacccattaagagtgagtgatgaaggctgggagcccagggagtgatgagggttggaagcccagtgggtgattgttgtcctaaaaggttgtacttgattttcatttgttgttgcacttagttgctatctgtcattgttgtgaaatctctaaaagattgttgatatacgaatttcatgaacaggatatgtataaaaattgatttgacattaaactgccagatttgatagcatgtctattctttgctggaattactggaaatgaaccataactgtgtagctcgttactatcttcggttccttatttattattgttacttgctgagttggttgtactcatactacaccctgcacttcatgtgcagatctaggtatttccggacatagcaggtgttgattctttcacacaattgatttttcggagattctgaggtagctgccgtgtttcgcagaccttgcctctccttccctatcttcttatttactatatttggtctcagactattacggactatatttttcagacttgtattcataattagatgctcatgtactcagtgacaccaggttttaggagtggttgtatcggtaattgtaagatttatggatgttatttaaatattatattttcagacttggaagaagttatggttcattaagatttcggcttgcctagtattgagataggcgccatcacaactggttaaaattttgggtcatgacaattacagattctttgtgtaccttcagtttgtaggaatttgatttctattgcaagacttgatgtttctgaatttgatttaaagtttgaaaatggatgttttaatttatataagaatgctgttttttatggttctcgtattcttattgatggtttatataaattgaaactcgatattggtttttccgaattccttcttacttttcaacacaatattgggattaaacgtatttcactagatgatagttcttcttacttgcggcatagacgtttgggtcatatatccaaagaaaggttaaaaagattagtaaagaataatattctttcgaatctgaattttactgattatactatatgtttggattgcattaagggaaagcaaacgaagcatagtaagaaaggtgccacaagaagcatccaactacttgaaattatacacaccaatatttgcggaccctttgatgttccatcttttggtggagaaaaatattttatcacttttatctatgacttttcacgttatggatatatctatttgctgaaagaaaaatctcaagcgacagatgctctcgaagtgtttgttaatgaggttgaaagacaattagataaaaacgtaaaaattattaggtcggatagaggtggtgaatattatgaaaaatataatgaattaggacaatgtccaggtccatttgcaaagttcctcgaggaatatggtatatgtgcacaatgtactatgacaggaacatctcaacaaaatggtgttgcaaaaaggcgtaatcgaacacttatggatatggttaggaacatgatggtaggctaaaattacgtattttagtcacttatttcactctaattcactgcactttattcacatttgagctgtaattggtagtgttttgcacttattgtgtgttttatgccttgtaggagtgattccgagctatgtagatgttatggaatgaattcgagctattnnnnnnnnnnnnnnnnnnnnnnnnnnnnnnnnnnnnnnnnnnnnnnnnnnnnnnnnnnnnnnnnnnnnnnnnnnnnnnnnnnnnnnnnnnnnnnnnnnnnnnnnnnnnnnnnnnnnnnnnnnnnnnnnnnnnnnnnnnnnnnnnnnnnnnnnnnnnnnnnnnnnnnnnnnnnnnnnnnnnnnnnnnnnnnnnnnnnnnnnnnnnnnnnnnnnnnnnnnnnnnnnnnnnnnnnnnnnnnnnnnnnnnnnnnnnnnnnnnnnnnnnnnnnnnnnnnnnnnnnnnnnnnnnnnnnnnnnnnnnnnnnnnnnnnnnnnnnnnnnnnnnnnnnnnnnnnnnnnnnnnnnnnnnnnnnnnnnnnnnnnnnnnnnnnnnnnnnnnnnnnnnnnnnnnnnnnnnnnnnnnnnnnnnnnnnnnnnnnnnnnnnnnnnnnnnnnnnnnnnnnnnnnnnnnnnnnnnnnnnnnnnnnnnnnnnnnnnnnnnnnnnnnnnnnnnnnnnnnnnnnnnnnnnnnnnnnnnnnnnnnnnnnnnnnnnnnnnnnnnnnnnnnnnnnnnnnnnnnnnnnnnnnnnnnnnnnnnnnnnnnnnnnnnnnnnnnnnnnnnnnnnnnnnnnnnnnnnnnnnnnnnnnnnnnnnnnnnnnnnnnnnnnnnnnnnnnnnnnnnnnnnnnnnnnnnnnnnnnnnnnnnnnnnnnnnnnnnnnnnnnnnnnnnnnnnnnnnnnnnnnnnnnnnnnnnnnnnnnnnnnnnnnnnnnnnnnnnnnnnnnnnnnnnnnnnnnnnnnnnnnnnnnnnnnnnnnnnnnnnnnnnnnnnnnnnnnnnnnnnnnnnnnnnnnnnnnnnnnnnnnnnnnnnnnnnnnnnnnnnnnntcccaaggtattaagctgggatcgttttcggagatcgagggccaaggctggacgtcaaaaattgaagtttctctatactctgagaatttcgatccccactttccgcagcgcgtggggcgccgtacttgtgcaatccttcactgtctgtcagaagttagctcactgtatttccccactaatgccctgcatagcgcgtcgccccatgcggcgcgcctgtgcaatacttacagagtaatttttctatttcggctagaagaaggtggttttgcctgggcccggtcctacttagtataaatacatgaaaaacgttttttcctagactttttgcacatattcgaactagggagtataaggaggagttgaaagaatatgagcacaaggatttcatcattcctcactcaagacacgagtttggatcgaatctatgttttcctatacattaattttatttgtgatgaatttctctgtatctatggagtagttctcttaagggtttgatggatttggtgtattgatgattgtttgtggattataactctagttttatgtattaaagcatttttggatgatttaatcattgcatctatagtcacttgttcatgtaattgacagaggcataacttgtgatatctttgcattatattattggttgagttcattaattcttcatagtaattgaaagatgctagttgaatcattgattaaacctaattaggaggatagtggagaaaggttatcctaaagaccaatccactacgtattcttgcatattttcacgtgcttaaattggttcattctgtgaggttaagacttaatcgagagaggagtttttgctgaacatttgaactaataattaagtgaattcgagagactcactaaaatattagaagtgaattacctagagttagatcccaaacaattatcttgcacctatcctatcgacccatattttctcccattgataagttcatttcttacctttgtttcgattgtcattagtcaataactttagcttcttagttaattttagttagacgtcttataatctcaattgttgatcatcttggatagtaaccaaactagaaactacaagaacattgtttaaatccaatccttgtggatacgatattatactatactatatttgattagcaagcataatttaggtgtgtgtttcgagctcgtcaaattttggcatcattgctggggattggcaatcaatattgtttgaaatagtttttggtgctaattcagaaattagattttaattttttttccccttcttttcttttcttttcttttcttttctttttccttttctattttattttctttattagttaacttcttttcaagattagttttgtagtacctaataaattggagaagatactatagattttggactctaaatgctgtgaagatggtatacaaccagacgaagaaaatggttgaagagttagcaactgaacattatcagcggcctgctatgtattttaaatgcggtggaaattatctatgagttgactgtcaaacaggtatgtattcttcttattgttcatattttgagtagtctcactctgtttctagttcgtacaggtatgaggattcatatgggcacaattctgactttggttaggatgaatacccttattataactggaatgaaagcaaagtgagacaaccacctcaatagaagaaaggtagtttagaagctcttatgcataggtacatgaatagtgttgaagaaaggtttatgcaaaatgatgaatttattaagaacctaacaatgcgagtgagctaattagtaagtatacttttaaaaatctcactgtgttgtgatggtgaatatatggaggagataccttgtgagaacgagcctactcaagaggatgagcatcgacagagagagatttccaccttaaagaggattttgattcaactgatatgattgaaaataaaattgtggttgagtgttaagaaacataagaagagttcaaacccacatccaccttccacatttgcaacctttagtagaagagaatgagaaacaaaaggtcttggacatactagataaatatttacttgacctttcttcttttttttcttattctaaccctgatcatgtggattttacttttggggacttacatgaatatgtatggattgattctgtgaaagaatgcaaaaacaaattaaggatcatcatgaacgagcaattcacttcttaatataaggacaagaaagaaagaaaaaatcgggtctagcaggtatcctcagaagaaacggacttaatgagctccacaaaaaatcccaaggagcaaaaacgaggaatgaattcagaattacgggtggagttcataagttctcggaaaagaaaaaaattcagggaagtttcctttcactactaaaaatctgctaaaaaccgaccaactatttctgatcaatgttggtcggtcaaaaaaagcgaccaaaaaccatccaggttggacggaaactggggaaaaaaaaatttacattttttttaaattaaataccgaccaacgttagtcggtaaattgatcaacgaattgacctagctggtcagacaagaaaattttggattaccgaccaacgttggtcggtaatctggatccaattttttaaattttaatnnnnnnnnnnnnnnnnnnnnnnnnnnnnnnnnnnnnnnnnnnnnnnnnnnnnnnnnnnnnnnnnnnnnnnnnnnnnnnnnnnnnnnnnnnnnnnnnnnnnnnnnnnnnnnnnnnnnnnnnnnnnnnnnnnnnnnnnnnnnnnnnnnnnnnnnnnnnnnnnnnnnnnnnnnnnnnnnnnnnnnnnnnnnnnnnnnnnnnnnnnnnnnnnnnnnnnnnnnnnnnnnnnnnnnnnnnnnnnnnnnnnnnnnnnnnnnnnnnnnnnnnnnnnnnnnnnnnnnnnnnnnnnnnnnnnnnnnnnnnnnnnnnnnnnnnnnnnnnnnnnnnnnnnnnnnnnnnnnnnnnnnnnnnnnnnnnnnnnnnnnnnnnnnnnnnnnnnnnnnnnnnnnnnnnnnnnnnnnnnnnnnnnnnnnnnnnnnnnnnnnnnnnnnnnnnnnnnnnnnnnnnnnnnnnnnnnnnnnnnnnnnnnnnnnnnnnnnnnnnnnnnnnnnnnnnnnnnnnnnnnnnnnnnnnnnnnnnnnnnnnnnnnnnnnnnnnnnnnnnnnnnnnnnnnnnnnnnnnnnnnnnnnnnnnnnnnnnnnnnnnnnnnnnnnnnnnnnnnnnnnnnnnnnnnnnnnnnnnnnnnnnnnnnnnnnnnnnnnnnnnnnnnnnnnnnnnnnnnnnnnnnnnnnnnnnnnnnnnnnnnnnnnnnnnnnnnnnnnnnnnnnnnnnnnnnnnnnnnnnnnnnnnnnnnnnnnnnnnnnnnnnnnnnnnnnnnnnnnnnnnnnnnnnnnnnnnnnnnnnnnnnnnnnnnnnnnnnnnnnnnnnnnnnnnnnnnnnnnnnnnnnnnnnnnnnnnnnnnnnnnnnnnnnnnnnnnnnnnnnnnnnnnnnnnnnnnnnnnnnnnnnnnnnnnnnnnnnnnnnnnnnnnnnnnnnnnnnnnnnnnnnnnnnnnnnnnnnnnnnnnnnnnnnnnnnnnnnnnnnnnnnnnnnnnnnnnnnnnnnnnnnnnnnnnnnnnnnnnnnnnnnnnnnnnnnnnnnnnnnnnnnnnnnnnnnnnnnnnnnnnnnnnnnnnnnnnnnnnnnnnnnnnnnnnnnnnnnnnnnnnnnnnnnnnnnnnnnnnnnnnnnnnnnnnnnnnnnnnnnnnnnnnnnnnnnnnnnnnnnnnnnnnnnnnnnnnnnnnnnnnnnnnnnnnnnnnnnnnnnnnnnnnnnnnnnnnnnnnnnnnnggaccaacgttggtcggttaatgtaggggaagcatttaccgaccaactttggtcggtaattgttatttggtcggtaattgttattttctgcaaaataaccgaccaaagttggtcggttattacgttaacattgatcaaactttcgaattacttttatatttactatctaaataatataaatgtaattcgttaacacttttgtaatacaaaaaatgaataaactaacatatactatatataacatgctatttgtaaattgattcattgacttataacttacttagatgcatcgatgaatattaaaaacaaaacatttgacctatatcgactaatagtaaaaataaaacgtctcgacttatatcgattaatctagctatgccatgcattattagtgatgaatgaatnnnnnnnnnnnnnnnnnnnnnnnnnnnnnnnnnnnnnnnnnnnnnnnnnnnnnnnnnnnnnnnnnnnnnnnnnnnnnnnnnnnnnnnnnnnnnnnnnnnnnnnnnnnnnnnnnnnnnnnnnnnnnnnnnnnnnnnnnnnnnnnnnnnnnnnnnnnnnnnnnnnnnnnnnnnnnnnnnnnnnnnnnnnnnnnnnnnnnnnnnnnnnnnnnnnnnnnnnnnnnnnnnnnnnnnnnnnnnnnnnnnnnnnnnnnnnnnnnnnnnnnnnnnnnnnnnnnnnnnnnnnnnnnnnnnnnnnnnnnnnnnnnnnnnnnnnnnnnnnnnnnnnnnnnnnnnnnnnnnnnnnnnnnnnnnnnnnnnnnnnnnnnnnnnnnnnnnnnnnnnnnnnnnnnnnnnnnnnnnnnnnnnnnnnnnnnnnnnnnnnnnnnnnnnnnnnnnnnnnnnnnnnnnnnnnnnnnnnnnnnnnnnnnnnnnnnnnnnnnnnnnnnnnnnnnnnnnnnnnnnnnnnnnnnnnnnnnnnnnnnnnnnnnnnnnnnnnnnnnnnnnnnnnnnnnnnnnnnnnnnnnnnnnnnnnnnnnnnnnnnnnnnnnnnnnnnnnnnnnnnnnnnnnnnnnnnnnnnnnnnnnnnnnnnnnnnnnnnnnnnnnnnnnnnnnnnnnnnnnnnnnnnnnnnnnnnnnnnnnnnnnnnnnnnnnnnngtgaagtatgtttgtgtgtgtgtgtatatatatatatataagaacacgaagcgctaggaccacagggtcgggttcttttagggatagacttgggaagatactaattagtatatatactttatcatcaaatatatctatttgtaaattgattcatcgacttataacttacttagatgtatcgatgaatattaatcgatgattcatcaaaacgtctcgacctatatatcgattaatctatgtcatgcattattagtgatgaacgaatgaaaaaagaagttattagcatcaattacaatataatgtatgtgtgtgtgtgagaaattactcacatacttaattataacttagaaaatttacttagatagatgctattataatttattaaaattaaatagttaatataattatttataaagattatgcttatagtttataattatttataataattgcatagttaaataaaataaattcttgtagtttataatattttttttatagtttataatattttaagaaacaaaaacacaaaaaaaaaagaatttaatttttttaaaaaaaaatccgaccaaagttggttggtttttggtcaaacggtcaacacttaatgtaccgaccaaaatgaccgaccaactttggtcggtaattctgaaatcagagaattaaaaaacggggaaaacccccatttctctgaaattttcccctctcttctctatttccctcactcgaaaccttcccctctccatctctatttctcttacataaatctcattccccaccccgcgttgccaccgcccagccctcgccgtcgccgtcgtcgtcgccactgccactgccactgctgcccctctccttctccatctcctaaaaattctaggtttgaattacaacccatttatttattatttctaggttttnnnnnnnnnnnnnnnnnnnnnnnnnnnnnnnnnnnnnnnnnnnnnnnnnnnnnnnnnnnnnnnnnnnnnnnnnnnnnnnnnnnnnnnnnnnnnnnnnnnnnnnnnnnnnnnnnnnnnnnnnnnnnnnnnnnnnnnnnnnnnnnnnnnnnnnnnnnnnnnnnnnnnnnnnnnnnnnnnnnnnnnnnnnnnnnnnnnnnnnnnnnnatttactaattagttttgttaattagtcaattagttatgaattagtttagtttagggtatgggttgaatttctttagtttagttagtttatgtttnnnnnnnnnnnnnnnnnnnnnnnnnnnnnnnnnnnnnnnnnnnnnnnnnnnnnnnnnnnnnnnnnnnnnnnnnnnnnnnnnnnnnnnnnnnnnnnnnnnnnnnnnnnnnnnnnnnnnnnnnnnnnnnnnnnnnnnnnnnnnnnnnnnnnnnnnnnnnnnnnnnnnnnnnnnnnnnnnnnnnnnnnnnnnnnnnnnnnnnnnnnnnnnnnnnnnnnnnnnnnnnnnnnnnnnnnnnnnnnnnnnnnnnnnnnnnnnnnnnnnnnnnnnnnnnnnnnnnnnnnnnnnnnnnnnnnnnnnnnnnnnnnnnnnnnnnnnnnnnnnnnnnnnnnnnnnnnnnnnnnnnnnnnnnnnnnnnnnnnnnnnnnnnnnnnnnnnnnnnnnnnnnnnnnnnnnnnnnnnnnnnnnnnnnnnnnnnnnnnnnnnnnnnnnnnnnnnnnnnnnnnnnnnnnnnnnnnnnnnnnnnnnnnnnnnnnnnnnnnnnnnnnnnnnnnnnnnnnnnnnnnnnnnnnnnnnnnnnnnnnnnnnnnnnnnnnnnnnnnnnnnnnnnnnnnnnnnnnnnnnnnnnnnnnnnnnnnnnnnnnnnnnnnnnnnnnnnnnnnnnnnnnnnnnnnnnnnnnnnnnnnnnnnnnnnnnnnnnnnnnnnnnnnnnnnnnnnnnnnnnnnnnnnnnnnnnnnnnnnnnnnnnnnnnnnnnnnnnnnnnnnnnnnnnnnnnnnnnnnnnnnnnnnnnnnnnnnnnnnnnnnnnnnnnnnnnnnnnnnnnnnnnnnnnnnnnnnnnnnnnnnnnnnnnnnnnnnnnnnnnnnnnnnnnnnnnnnnnnnnnnnnnnnnnnnnnnnnnnnnnnnnnnnnnnnnnnnnnnnnnnnnnnnnnnnnnnnnnnnnnnnnnnnnnnnnnnnnnnnnnnnnnnnnnnnnnnnnnnnnnnnnnnnnnnnnnnnnnnnnnnnnnnnnnnnnnnnnnnnnnnnnnnnnnnnnnnnnnnnnnnnnnnnnnnnnnnnnnnnnnnnnnnnnnnnnnnnnnnnnnnnnnnnnnnnnnnnnnnnnnnnnnnnnnnnnnnnnnnnnnnnnnnnnnnnnnnnnnnnnnnnnnnnnnnnnnnnnnnnnnnnnnnnnnnnnnnnnnnnnnnnnnnnnnnnnnnnnnnnnnnnnnnnnnnnnnnnnnnnnnnnnnnnnnnnnnnnnnnnnnnnnnnnnnnnnnnnnnnnnnnnnnnnnnnnnnnnnnnnnnnnnnnnnnnnnnnnnnnnnnnnnnnnnnnnnnnnnnnnnnnnnnnnnnnnnnnnnnnnnnnnnnnnnnnnnnnnnnnnnnnnnnnnnnnnnnnnnnnnnnnnnnnnnnnnnnnnnnnnnnnnnnnnnnnnnnnnnnnnnnnnnnnnnnnnnnnnnnnnnnnnnnnnnnnnnnnnnnnnnnnnnnnnnnnnnnnnnnnnnnnnnnnnnnnnnnnnnnnnnnnnnnnnnnnnnnnnnnnnnnnnnnnnnnnnnnnnnnnnnnnnnnnnnnnnnnnnnnnnnnnnnnnnnnnnnnnnnnnnnnnnnnnnnnnnnnnnnnnnnnnnnnnnnnnnnnnnnnnnnnnnnnnnnnnnnnnnnnnnnnnnnnnnnnnnnnnnnnnnnnnnnnnnnnnnnnnnnnnnnnnnnnnnnnnnnnnnnnnnnnnnnnnnnnnnnnnnnnnnnnnnnnnnnnnnnnnnnnnnnnnnnnnnnnnnnnnnnnnnnnnnnnnnnnnnnnnnnnnnnnnnnnnnnnnnnnnnnnnnnnnnnnnnnnnnnnnnnnnnnnnnnnnnnnnnnnnnnnnnnnnnnnnnnnnnnnnnnnnnnnnnnnnnnnnnnnnnnnnnnnnnnnnnnnnnnnnnnnnnnnnnnnnnnnnnnnnnnnnnnnnnnnnnnnnnnnnnnnnnnnnnnnnnnnnnnnnnnnnnnnnnnnnnnnnnnnnnnnnnnnnnnnnnnnnnnnnnnnnnnnnnnnnnnnnnnnnnnnnnnnnnnnnnnnnnnnnnnnnnnnnnnnnnnnnnnnnnnnnnnnnnnnnnnnnnnnnnnnnnnnnnnnnnnnnnnnnnnnnnnnnnnnnnnnnnnnnnnnnnnnnnnnnnnnnnnnnnnnnnnnnnnnnnnnnnnnnnnnnnnnnnnnnnnnnnnnnnnnnnnnnnnnnnnnnnnnnnnnnnnnnnnnnnnnnnnnnnnnnnnnnnnnnnnnnnnnnnnnnnnnnnnnnnnnnnnnnnnnnnnnnnnnnnnnnnnnnnnnnnnnnnnnnnnnnnnnnnnnnnnnnnnnnnnnnnnnnnnnnnnnnnnnnnnnnnnnnnnnnnnnnnnnnnnnnnnnnnnnnnnnnnnnnnnnnnnnnnnnnnnnnnnnnnnnnnnnnnnnnnnnnnnnnnnnnnnnnnnnnnnnnnnnnnnnnnnnnnnnnnnnnnnnnnnnnnnnnnnnnnnnnnnnnnnnnnnnnnnnnnnnnnnnnnnnnnnnnnnnnnnnnnnnnnnnnnnnnnnnnnnnnnnnnnnnnnnnnnnnnnnnnnnnnnnnnnnnnnnnnnnnnnnnnnnnnnnnnnnnnnnnnnnnnnnnnnnnnnnnnnnnnnnnnnnnnnnnnnnnnnnnnnnnnnnnnnnnnnnnnnnnnnnnnnnnnnnnnnnnnnnnnnnnnnnnnnnnnnnnnnnnnnnnnnnnnnnnnnnnnnnnnnnnnnnnnnnnnnnnnnnnnnnnnnnnnnnnnnnnnnnnnnnnnnnnnnnnnnnnnnnnnnnnnnnnnnnnnnnnnnnnnnnnnnnnnnnnnnnnnnnnnnnnnnnnnnnnnnnnnnnnnnnnnnnnnnnnnnnnnnnnnnnnnnnnnnnnnnnnnnnnnnnnnnnnnnnnnnnnnnnnnnnnnnnnnnnnnnnnnnnnnnnnnnnnnnnnnnnnnnnnnnnnnnnnnnnnnnnnnnnnnnnnnnnnnnnnnnnnnnnnnnnnnnnnnnnnnnnnnnnnnnnnnnnnnnnnnnnnnnnnnnnnnnnnnnnnnnnnnnnnnnnnnnnnnnnnnnnnnnnnnnnnnnnnnnnnnnnnnnnnnnnnnnnnnnnnnnnnnnnnnnnnnnnnnnnnnnnnnnnnnnnnnnnnnnnnnnnnnnnnnnnnnnnnnnnnnnnnnnnnnnnnnnnnnnnnnnnnnnnnnnnnnnnnnnnnnnnnnnnnnnnnnnnnnnnnnnnnnnnnnnnnnnnnnnnnnnnnnnnnnnnnnnnnnnnnnnnnnnnnnnnnnnnnnnnnnnnnnnnnnnnnnnnnnnnnnnnnnnnnnnnnnnnnnnnnnnnnnnnnnnnnnnnnnnnnnnnnnnnnnnnnnnnnnnnnnnnnnnnnnnnnnnnnnnnnnnnnnnnnnnnnnnnnnnnnnnnnnnnnnnnnnnnnnnnnnnnnnnnnnnnnnnnnnnnnnnnnnnnnnnnnnnnnnnnnnnnnnnnnnnnnnnnnnnnnnnnnnnnnnnnnnnnnnnnnnnnnnnnnnnnnnnnnnnnnnnnnnnnnnnnnnnnnnnnnnnnnnnnnnnnnnnnnnnnnnnnnnnnnnnnnnnnnnnnnnnnnnnnnnnnnnnnnnnnnnnnnnnnnnnnnnnnnnnnnnnnnnnnnnnnnnnnnnnnnnnnnnnnnnnnnnnnnnnnnnnnnnnnnnnnnnnnnnnnnnnnnnnnnnnnnnnnnnnnnnnnnnnnnnnnnnnnnnnnnnnnnnnnnnnnnnnnnnnnnnnnnnnnnnnnnnnnnnnnnnnnnnnnnnnnnnnnnnnnnnnnnnnnnnnnnnnnnnnnnnnnnnnnnnnnnnnnnnnnnnnnnnnnnnnnnnnnnnnnnnnnnnnnnnnnnnnnnnnnnnnnnnnnnnnnnnnnnnnnnnnnnnnnnnnnnnnnnnnnnnnnnnnnnnnnnnnnnnnnnnnnnnnnnnnnnnnnnnnnnnnnnnnnnnnnnnnnnnnnnnnnnnnnnnnnnnnnnnnnnnnnnnnnnnnnnnnnnnnnnnnnnnnnnnnnnnnnnnnnnnnnnnnnnnnnnnnnnnnnnnnnnnnnnnnnnnnnnnnnnnnnnnnnnnnnnnnnnnnnnnnnnnnnnnnnnnnnnnnnnnnnnnnnnnnnnnnnnnnnnnnnnnnnnnnnnnnnnnnnnnnnnnnnnnnnnnnnnnnnnnnnnnnnnnnnnnnnnnnnnnnnnnnnnnnnnnnnnnnnnnnnnnnnnnnnnnnnnnnnnnnnnnnnnnnnnnnnnnnnnnnnnnnnnnnnnnnnnnnnnnnnnnnnnnnnnnnnnnnnnnnnnnnnnnnnnnnnnnnnnnnnnnnnnnnnnnnnnnnnnnnnnnnnnnnnnnnnnnnnnnnnnnnnnnnnnnnnnnnnnnnnnnnnnnnnnnnnnnnnnnnnnnnnnnnnnnnnnnnnnnnnnnnnnnnnnnnnnnnnnnnnnnnnnnnnnnnnnnnnnnnnnnnnnnnnnnnnnnnnnnnnnnnnnnnnnnnnnnnnnnnnnnnnnnnnnnnnnnnnnnnnnnnnnnnnnnnnnnnnnnnnnnnnnnnnnnnnnnnnnnnnnnnnggatgaaacagagtatattttgggagttgccttattggaaggataatcttctccgacacaaccttgatgtcatgcatattaagaagaattattttnnnnnnnnnnnnnnnnnnnnnnnnnnnnnnnnnnnnnnnnnnnnnnnnnnnnnnnnnnnnnnnnnnnnnnnnnnnnnnnnnnnnnnnnnnnnnnnnnnnnnnnnnnnnnnnnnnnnnnnnnnnnnnnnnnnnnnnnnnnnnnnnnnnnnnnnnnnnnnnnnnnnnnnnnnnnnnnnnnnnnnnnnnnnnnnnnnnnnnnnnnnnnnnnnnnnnnnnnnnnnnnnnnnnnnnnnnnnnnnnnnnnnnnnnnnnnnnnnnnnnnnnnnnnnnnnnnnnnnnnnnnnnnnnnnnnnnnnnnnnnnnnnnnnnnnnnnnnnnnnnnnnnnnnnnnnnnnnnnnnnnnnnnnnnnnnnnnnnnnnnnnnnnnnnnnnnnnnnnnnnnnnnnnnnnnnnnnnnnnnnnnnnnnnnnnnnnnnnnnnnnnnnnnnnnnnnnnnnnnnnnnnnnnnnnnnnnnnnnnnnnnnnnnnnnnnnnnnnnnnnnnnnnnnnnnnnnnnnnnnnnnnnnnnnnnnnnnnnnnnnnnnnnnnnnnnnnnnnnnnnnnnnnnnnnnnnnnnnnnnnnnnnnnnnnnnnnnnnnnnnnnnnnnnnnnnnnnnnnnnnnnnnnnnnnnnnnnnnnnnnnnnnnnnnnnnnnnnnnnnnnnnnnnnnnnnnnnnnnnnnnnnnnnnnnnnnnnnnnnnnnnnnnnnnnnnnnnnnnnnnnnnnnnnnnnnnnnnnnnnnnnnnnnnnnnnnnnnnnnnnnnnnnnnnnnnnnnnnnnnnnnnnnnnnnnnnnnnnnnnnnnnnnnnnnnnnnnnnnnnnnnnnnnnnnnnnnnnnnnnnnnnnnnnnnnnnnnnnnnnnnnnnnnnnnnnnnnnnnnnnnnnnnnnnnnnnnnnnnnnnnnnnnnnnnnnnnnnnnnnnnnnnnnnnnnnnnnnnnnnnnnnnnnnnnnnnnnnnnnnnnnnnnnnnnnnnnnnnnnnnnnnnnnnnnnnnnnnnnnnnnnnnnnnnnnnnnnnnnnnnnnnnnnnnnnnnnnnnnnnnnnnnnnnnnnnnnnnnnnnnnnnnnnnnnnnnnnnnnnnnnnnnnnnnnnnnnnnnnnnnnnnnnnnnnnnnnnnnnnnnnnnnnnnnnnnnnnnnnnnnnnnnnnnnnnnnnnnnnnnnnnnnnnnnnnnnnnnnnnnnnnnnnnnnnnnnnnnnnnnnnnnnnnnnnnnnnnnnnnnnnnnnnnnnnnnnnnnnnnnnnnnnnnnnnnnnnnnnnnnnnnnnnnnnnnnnnnnnnnnnnnnnnnnnnnnnnnnnnnnnnnnnnnnnnnnnnnnnnnnnnnnnnnnnnnnnnnnnnnnnnnnnnnnnnnnnnnnnnnnnnnnnnnnnnnnnnnnnnnnnnnnnnnnnnnnnnnnnnnnnnnnnnnnnnnnnnnnnnnnnnnnnnnnnnnnnnnnnnnnnnnnnnnnnnnnnnnnnnnnnnnnnnnnnnnnnnnnnnnnnnnnnnnnnnnnnnnnnnnnnnnnnnnnnnnnnnnnnnnnnnnnnnnnnnnnnnnnnnnnnnnnnnnnnnnnnnnnnnnnnnnnnnnnnnnnnnnnnnnnnnnnnnnnnnnnnnnnnnnnnnnnnnnnnnnnnnnnnnnnnnnnnnnnnnnnnnnnnnnnnnnnnnnnnnnnnnnnnnnnnnnnnnnnnnnnnnnnnnnnnnnnnnnnnnnnnnnnnnnnnnnnnnnnnnnnnnnnnnnnnnnnnnnnnnnnnnnnnnnnnnnnnnnnnnnnnnnnnnnnnnnnnnnnnnnnnnnnnnnnnnnnnnnnnnnnnnnnnnnnnnnnnnnnnnnnnnnnnnnnnnnnnnnnnnnnnnnnnnnnnnnnnnnnnnnnnnnnnnnnnnnnnnnnnnnnnnnnnnnnnnnnnnnnnnnnnnnnnnnnnnnnnnnnnnnnnnnnnnnnnnnnnnnnnnnnnnnnnnnnnnnnnnnnnnnnnnnnnnnnnnnnnnnnnnnnnnnnnnnnnnnnnnnnnnnnnnnnnnnnnnnnnnnnnnnnnnnnnnnnnnnnnnnnnnnnnnnnnnnnnnnnnnnnnnnnnnnnnnnnnnnnnnnnnnnnnnnnnnnnnnnnnnnnnnnnnnnnnnnnnnnnnnnnnnnnnnnnnnnnnnnnnnnnnnnnnnnnnnnnnnnnnnnnnnnnnnnnnnnnnnnnnnnnnnnnnnnnnnnnnnnnnnnnnnnnnnnnnnnnnnnnnnnnnnnnnnnnnnnnnnnnnnnnnnnnnnnnnnnnnnnnnnnnnnnnnnnnnnnnnnnnnnnnnnnnnnnnnnnnnnnnnnnnnnnnnnnnnnnnnnnnnnnnnnnnnnnnnnnnnnnnnnnnnnnnnnnnnnnnnnnnnnnnnnnnnnnnnnnnnnnnnnnnnnnnnnnnnnnnnnnnnnnnnnnnnnnnnnnnnnnnnnnnnnnnnnnnnnnnnnnnnnnnnnnnnnnnnnnnnnnnnnnnnnnnnnnnnnnnnnnnnnnnnnnnnnnnnnnnnnnnnnnnnnnnnnnnnnnnnnnnnnnnnnnnnnnnnnnnnnnnnnnnnnnnnnnnnnnnnnnnnnnnnnnnnnnnnnnnnnnnnnnnnnnnnnnnnnnnnnnnnnnnnnnnnnnnnnnnnnnnnnnnnnnnnnnnnnnnnnnnnnnnnnnnnnnnnnnnnnnnnnnnnnnnnnnnnnnnnnnnnnnnnnnnnnnnnnnnnnnnnnnnnnnnnnnnnnnnnnnnnnnnnnnnnnnnnnnnnnnnnnnnnnnnnnnnnnnnnnnnnnnnnnnnnnnnnnnnnnnnnnnnnnnnnnnnnnnnnnnnnnnnnnnnnnnnnnnnnnnnnnnnnnnnnnnnnnnnnnnnnnnnnnnnnnnnnnnnnnnnnnnnnnnnnnnnnnnnnnnnnnnnnnnnnnnnnnnnnnnnnnnnnnnnnnnnnnnnnnnnnnnnnnnnnnnnnnnnnnnnnnnnnnnnnnnnnnnnnnnnnnnnnnnnnnnnnnnnnnnnnnnnnnnnnnnnnnnnnnnnnnnnnnnnnnnnnnnnnnnnnnnnnnnnnnnnnnnnnnnnnnnnnnnnnnnnnnnnnnnnnnnnnnnnnnnnnnnnnnnnnnnnnnnnnnnnnnnnnnnnnnnnnnnnnnnnnnnnnnnnnnnnnnnnnnnnnnnnnnnnnnnnnnnnnnnnnnnnnnnnnnnnnnnnnnnnnnnnnnnnnnnnnnnnnnnnnnnnnnnnnnnnnnnnnnnnnnnnnnnnnnnnnnnnnnnnnnnnnnnnnnnnnnnnnnnnnnnnnnnnnnnnnnnnnnnnnnnnnnnnnnnnnnnnnnnnnnnnnnnnnnnnnnnnnnnnnnnnnnnnnnnnnnnnnnnnnnnnnnnnnnnnnnnnnnnnnnnnnnnnnnnnnnnnnnnnnnnnnnnnnnnnnnnnnnnnnnnnnnnnnnnnnnnnnnnnnnnnnnnnnnnnnnnnnnnnnnnnnnnnnnnnnnnnnnnnnnnnnnnnnnnnnnnnnnnnnnnnnnnnnnnnnnnnnnnnnnnnnnnnnnnnnnnnnnnnnnnnnnnnnnnnnnnnnnnnnnnnnnnnnnnnnnnnnnnnnnnnnnnnnnnnnnnnnnnnnnnnnnnnnnnnnnnnnnnnnnnnnnnnnnnnnnnnnnnnnnnnnnnnnnnnnnnnnnnnnnnnnnnnnnnnnnnnnnnnnnnnnnnnnnnnnnnnnnnnnnnnnnnnnnnnnnnnnnnnnnnnnnnnnnnnnnnnnnnnnnnnnnnnnnnnnnnnnnnnnnnnnnnnnnnnnnnnnnnnnnnnnnnnnnnnnnnnnnnnnnnnnnnnnnnnnnnnnnnnnnnnnnnnnnnnnnnnnnnnnnnnnnnnnnnnnnnnnnnnnnnnnnnnnnnnnnnnnnnnnnnnnnnnnnnnnnnnnnnnnnnnnnnnnnnnnnnnnnnnnnnnnnnnnnnnnnnnnnnnnnnnnnnnnnnnnnnnnnnnnnnnnnnnnnnnnnnnnnnnnnnnnnnnnnnnnnnnnnnnnnnnnnnnnnnnnnnnnnnnnnnnnnnnnnnnnnnnnnnnnnnnnnnnnnnnnnnnnnnnnnnnnnnnnnnnnnnnnnnnnnnnnnnnnnnnnnnnnnnnnnnnnnnnnnnnnnnnnnnnnnnnnnnnnnnnnnnnnnnnnnnnnnnnnnnnnnnnnnnnnnnnnnnnnnnnnnnnnnnnnnnnnnnnnnnnnnnnnnnnnnnnnnnnnnnnnnnnnnnnnnnnnnnnnnnnnnnnnnnnnnnnnnnnnnnnnnnnnnnnnnnnnnnnnnnnnnnnnnnnnnnnnnnnnnnnnnnnnnnnnnnnnnnnnnnnnnnnnnnnnnnnnnnnnnnnnnnnnnnnnnnnnnnnnnnnnnnnnnnnnnnnnnnnnnnnnnnnnnnnnnnnnnnnnnnnnnnnnnnnnnnnnnnnnnnnnnnnnnnnnnnnnnnnnnnnnnnnnnnnnnnnnnnnnnnnnnnnnnnnnnnnnnnnnnnnnnnnnnnnnnnnnnnnnnatatcatagccacgtggattgcatccatccatgtcacagccactcgggtcacagccacttgggtcacaaccactcgggtcacagccatcggtatcacatccacttgggtcgcatctagctatgtcgcagtcacagggatcgcaaccatcttcatcatcgactccatctattgcaggccttcgcctgcgaggtattagctctgacccgcctacaccgtcttcacatgcctctgatacacatgcttcgtatggtgatgacgaggtagtgcattatgatcgatatggcaggatcatcatagtccctgagggtgatgggtaagtgttattcattatttttgcgtctattgatttgtaacatttttactaagatattaatatgtttttattgttaaattgcaggttcaggccgggtaataagactacaaggataatcaccaatgccatcagaaagctttatgatggcccttatgcgacttggactgattgcccattctcactgaagaagcaaattttcaatcaatttaaggtataaatgttcttttaaacagtttaataatttatatttatgatgtttccatctaatatttaacttttgaaatacaatgctagtgtgtatgggaagaccgctatagcgtggaagtggctacaaatttttgatcataaagctagcaagagattggcggatgctttctcggatgctagaaagaagaacaagaggcctggctggttaattgagaatttgtggaatgatttgcaaaggcaatggcttaccgtagagttcttagagaggagcgaaaaaggaaagaaagctcgcgcatccgagaagggaggctccctgcacactggaggtacgatcagcctagggacaataaaaagaagattggtacgtaattgcttaaattattttacttttctaagtatatctattctgtttcttaactaaattaatttattttcaggaaaagaagtatgggcgtacaatgagtcatgatgagctattcaaggagacacatattgtgaagaagaagaaagagggggatcaagataggtgggtcgaggaccgggcctcgactgcatatgtaagctttcaattttctttaagtattataatttacttttataaaaaatttgaaatactgatttaatttaaaataatatagggtctctaccaaagtaatgtgaaggaattcatccgtagtcatccagctggtgaatcgggtgagccaacccaaccttcggacgaggatgctgaaagaatatggttggagtctgttggcggtccaaaatgggggaaggtatacgggcttcctactaaaaacttccatcgctataagtgtggaatgcgaggaatagggacttcctcacaaggtgagcgacttaatagggagagcctctccgctatgcgggagacagtgacaaagctcacatcagagctagaagcagtcaaggaaagagaaaggcttagagatgctcaattccttggcatgcaagctcagatcagaactctcctatctagtggagctttttcgttgcccnnnnnnnnnnnnnnnnnnnnnnnnnnnnnnnnnnnnnnnnnnnnnnnnnnnnnnnnnnnnnnnnnnnnnnnnnnnnnnnnnnnnnnnnnnnnnnnnnnnnnnnnnnnnnnnnnnnnnnnnnnnnnnnnnnnnnnnnnnnnnnnnnnnnnnnnnnnnnnnnnnnnnnnnnnnnnnnnnnnnnnnnnnnnnnnnnnnnnnnnnnnnnnnnnnnnnnnnnnnnnnnnnnnnnnnnnnnnnnnnnnnnnnnnnnnnnnnnnnnnnnnnnnnnnnnnnnnnnnnnnnnnnnnnnnnnnnnnnnnnnnnnnnnnnnnnnnnnnnnnnnnnnnnnnnnnnnnnnnnnnnnnnnnnnnnnnnnnnnnnnnnnnnnnnnnnnnnnnnnnnnnnnnnnnnnnnnnnnnnnnnnnnnnnnnnnnnnnnnnntattaaataccccttgacttttatatactttgaactagacaaatagaaccagttttgaactagttgtaattagttttaacttggttttggattttnnnnnnnnnnnnnnnnnnnnnnnnnnnnnnnnnnnnnnnnnnnnnnnnnnnnnnnnnnnnnnnnnnnnnnnnnnnnnnnnnnnnnnnnnnnnnnnnnnnnnnnnnnnnnnnnnnnnnnnnnnnnnnnnnnnnnnnnnnnnnnnnnnnnnnnnnnnnnnnnnnnnnnnnnnnnnnnnnnnnnnnnnnnnnnnnnnnnnnnnnnnnnnnnnnnnnnnnnnnnnnnnnnnnnnnnnnnnnnnnnnnnnnnnnnnnnnnnnnnnnnnnnnnnnnnnnnnnnnnnnnnnnnnnnnnnnnnnnnnnnnnnnnnnnnnnnnnnnnnnnnnnnnnnnnnnnnnnnnnnnnnnnnnnnnnnnnnnnnnnnnnnnnnnnnnnnnnnnnnnnnnnnnnnnnnnnnnnnnnnnnnnnnnnnnnnnnnnnnnnnnnnnnnnnnnnnnnnnnnnnnnnnnnnnnnnnnnnnnnnnnnnnnnnnnnnnnnnnnnnnnnnnnnnnnnnnnnnnnnnnnnnnnnnnnnnnnnnnnnnnnnnnnnnnnnnnnnnnnnnnnnnnnnnnnnnnnnnnnnnnnnnnnnnnnnnnnnnnnnnnnnnnnnnnnnnnnnnnnnnnnnnnnnnnnnnnnnnnnnnnnnnnnnnnnnnnnnnnnnnnnnnnnnnnnnnnnnnnnnnnnnnnnnnnnnnnnnnnnnnnnnnnnnnnnnnnnnnnnnnnnnnnnnnnnnnnnnnnnnnnnnnnnnnnnnnnnnnnnnnnnnnnnnnnnnnnnnnnnnnnnnnnnnnnnnnnnnnnnnnnnnnnnnnnnnnnnnnnnnnnnnnnnnnnnnnnnnnnnnnnnnnnnnnnnnnnnnnnnnnnnnnnnnnnnnnnnnnnnnnnnnnnnnnnnnnnnnnnnnnnnnnnnnnnnnnnnnnnnnnnnnnnnnnnnnnnnnnnnnnnnnnnnnnnnnnnnnnnnnnnnnnnnnnnnnnnnnnnnnnnnnnnnnnnnnnnnnnnnnnnnnnnnnnnnnnnnnnnnnnnnnnnnnnnnnnnnnnnnnnnnnnnnnntgtgttgttgttgttgttgtgttattgttgttgttgttgttgttgttgtgttgttgttattgtgctgttattgttattaggtgtattggtatgctggcaggtggtgtagctgccaaaacaggcattttatgccaaaattaaacccagaaaaaccgaccannnnnnnnnnnntattgaattcccagaatttaacattaccgaccaactttggtcggtattttgcctgcactgttgagattaccgaccatagttggtcggtaatgtttaannnnnnnnnnnnnnnnnnnnnnnnnnnnnnnnnnnnnnnnnnnnnnnnnnnnnaaattaccgaccaaagttggtcggtttttttcaattttaataattaataaaaaaaacataatttagttaaaccgaccaactttggtcggtaaaattaaattaataaaatatgtttcctaccaaagttggtcggtaagtaattaaacttgtcagatggtcgttttaagctaccgaccaaagttggtcggtaatttccgaccaactttggtcggtaagccattccgaccatcaaaacaccgtccacaccgtaatggtcgcattttggtcggtaattggccataaccgaccaacgttggtcggttcttagcgaatttctagtagtgtttacctcttgctttttaattgtgtatcatggggacattctacaacttaaagtgtgggatgggggatatgttgtatgtatattagttttagtttttattagttgtaatagttggaaaaaattgaaaaacaactataaaaattgaaaataattgtcgattttcccgacgatggatatcgttcgacaggtttcttgagggagtaaagtcgaaagaaaaagacaaaaggattttcttttgttaggtagtgtgttaattcccccttggttttttttgtgtcgcggttcttttccaagagttttgtctgattcgggcatagttagtttttgttttgtagagtagtagaaaaccttgtgctatgatttgaattgaaggcaatatctattgacttgattataccttgagaatagtatgcgtgctttagtgtgacacttaggcttagttttggactcgtgtataagttttatcttaaattctatgatattaaccttgcttaaatgctttgactagagtgtctggatagtacgatcctgagtgagttatgtgtcatgtgtgtatgagattttgtgctattctgtacattgaatttgttgtctagaacttgccccgtgtgtttgcaaagcgaaatagtagttttgttcagtcttggaagtgatttaggcatttctttgttgagccagttnnnnnnnnnnnnnnnnnnnnnnnnnnnnnnnnnnnnnnnnnnnnnnnnnnnnnnnnnnnnnnnnnnnnnnnnnnnnnnnnnnnnnnnnnnnnnnnnnnnnnnnnnnnnnnnnnnnnnnnnnnnnnnnnnnnnnnnnnnnnnnnnnnnnnnnnnnnnnnnnnnnnnnnnnnnnnnnnnnnnnnnnnnnnnnnnnnnnnnnnnnnnnnnnnnnnnnnnnnnnnnnnnnnnnnnnnnnnnnnnnnnnnnnnnnnnnnnnnnnnnnnnnnnnnnnnnnnnnnnnnnnnnnnnnnnnnnnnnnnnnnnnnnnnnnnnnnnnnnnnnnnnnnnnnnnnnnnnnnnnnnnnnnnnnnnnnnnnnnnnnnnnnnnnnnnnnnnnnnnnnnnnnnnnnnnnnnnnnnnnnnnnnnnnnnnnnnnnnnnnnnnnnnnnnnnnnnnnnnnnnnnnnnnnnnnnnnnnnnnnnnnnnnnnnnnnnnnnnnnnnnnnnnnnnnnnnnnnnnnnnnnnnnnnatatgttattacccacatgattgttatatatcttagttaacctctttgagtttgtaatcttgtctctttggaaactacgttgcaagtcttacccatttgtttgattagactatctatttgaaccttgtacctctcgtgagcacttgaatttgtgatgaactatgtaaaggttgatgtgtggggtggttgatttggattttgagtgaaactattgaaataaggagaaaggtgcactgttttaaaaaagtaagagccacttgaattgaataagaaaagaaaaaataggtgtgtgattgtgtaaaagctccttgatagtggtaacttgatgtaattatgtttaaagaagtagggagttaatgtatattgatgtgaaggtagagttttggtttggcataagtgtggggttttgaacaatgaaatatatgtattaaagtgcttagggaggtgtagtcactctaatatccaaatatatcctacccatcccacagcgtacattacaaccaattaaagtcttacttgatcattgactgataagctcaattagtagagtagtacactacgggcaagcatatggtacgtcttttgtggcatatgaatgttgtttctgagagtgagtgaattctttctattttaagttcctagttgttcttaaatttcattgcgtgtataactactctctattattgtgtgagggtacttaattcatgaaggaaaggtaattcttgacctctgtgttagagtaagtgagcgggttatgaaaaatgcatggtgcttttgagtcaaatcttgaggtgaagatgttacggtattgtgcttaatgtgttttaaatattcttggtgtgataagttatgagattgttttcaaaaggtcatgtttatataacgtgtagtttgattgctcgaggacgagtaatgatttaagtgttgggtgttgatggtaggatataattgcgtattttagtcactcattgcactctaattcactgtactttattcatgtttgagttttaatttgtagtgttttgcatttattatgtgttttatgccttgtaggagttattccgaactatgttgatgttatgaaatgaattcgaggtatttggagctttgaagtctgagtaaaaacctaatggattaatccgggatcgtgtttgggggccgaggaccaagtctagacgtcaaaaaccgaagtttggtctgtactctgagaattccccactgccgcggagtgtggggcgccgtgcttttgcaatcctctgatgtctgtcagaagttagctctctagatttccctactaatgcccctcatggagcgtcgccccatgcgacacgcctgtgtaagttttacagagtaattttcctatttcggctagaagaaggtggtttcgtctcgacccgacctacttggtataaatacatggaaaatgttatttcataaacttttgacacatattcgatctagggaggctaagaaagagttggaagaacacgcgcacaaggatttcatcattctttcctcagtcaagacgtgagtttggatcgaatcaatattttcatatactttaattttatttgtgaggaatttctccatatctatggagtagttctctttagggtttgatggatttggtgtattgatgattgtttgtgaattataactctagttttatgtgttgaaacatttctggatgatttaattgttgcatctatattcacttgttcatataatcgagagagacataacttgtgatatctttgcattatattgttggttgagtttattaattcttcttagtaataaaaagaggctatttaaatcattgattaaacctagttaggatgataatcgagaaaggttctcctaaataccaatccactacgcattcttgcatatcttcacgtgcttaaattggttgatcttgtgagtttaagacttaatcgggagaggagtttttgttgaacatttaaactaataattgagagaattcaagagaatcacttaaacattataagtgaattacctagagttagatcccaaacaattatctcgcacctatcctctcaacccatattttctcttattgaggtaagtaacacttctaaacttggttctaagggtatgaatccccgaatttggtatgatataaattgtttggaagtgacacacacaataggtgatgaatatgtagacgtgcaccacataaattatgtcttgaataaatcctgtgaagttataaaattaaagaatcatgttattatctaaacattctccacgtgttagagaaattgagttgaggctcctattaaagatcatgtttaggctacgtgccaatattttgggacccatggggtcnnnnnnnnnnnnnnnnnnnnnnnnnnnnnnnnnnnnnnnnnnnnnnnnnnnnnnnnnnnnnnnnnnnnnnnnnnnnnnnnnnnnnnnnnnnnnnnnnnnnnnnnnnnnnnnnnnnnnnnnnnnnnnnnnnnnnnnnnnnnnnnnnnnnnnnnnnnnnnnnnnnnnnnnnnnnnnnnnnnnnnnnnnnnnnnnnnnnnnnnnnnnnnnnnnnnnnnnnnnnnnnnnnnnnnnnnnnnnnnnnnnnnnnnnnnnnnnnnnnnnnnnnnnnnnnnnnnnnnnnnnnnnnnnnnnnnnnnnnnnnnnnnnnnnnnnnnnnnnnnnnnnnnnnnnnnnnnnnnnnnnnnnnnnnnnnnnnnnnnnnnnnnnnnnnnnnnnnnnnnnnnnnnnnnnnnnnnnnnnnnnnnnnnnnnnnnnnnnnnnnnnnnnnnnnnnnnnnnnnnnnnnnnnnnnnnnnnnnnnnnnnnnnnnnnnnnnnnnnnnnnnnnnnnnnnnnnnnnnnnnnnnnnnnnnnnnnnnnnnnnnnnnnnnnnnnnnnnnnnnnnnnnnnnnnnnnnnnnnnnnnnnnnnnnnnnnnnnnnnnnnnnnnnnnnnnnnnnnnnnnnnnnnnnnnnnnnnnnnnnnnnnnnnnnnnnnnnnnnnnnnnnnnnnnnnnnnnnnnnnnnnnnnnnnnnnnnnnnnnnnnnnnnnnnnnnnnnnnnnnnnnnnnnnnnnnnnnnnnnnnnnnnnnnnnnnnnnnnnnnnnnnnnnnnnnnnnnnnnnnnnnnnnnnnnnnnnnnnnnnnnnnnnnnnnnnnnnnnnnnnnnnnnnnnnnnnnnnnnnnnnnnnnnnnnnnnnnnnnnnnnnnnnnnnnnnnnnnnnnnnnnnnnnnnnnnnnnnnnnnnnnnnnnnnnnnnnnnnnnnnnnnnnnnnnnnnnnnnnnnnnnnnnnnnnnnnnnnnnnnnnnnnnnnnnnnnnnnnnnnnnnnnnnnnnnnnnnnnnnnnnnnnnnnnnnnnnnnnnnnnnnnnnnnnnnnnnnnnnnnnnnnnnnnnnnnnnnnnnnnnnnnnnnnnnnnnnnnnnnnnnnnnnnnnnnnnnnnnnnnntaatatacatttcacactcagtaataattgtccattgtgaggatatttatgggatcgatctgcgcgacacagcatgccataatggctttatacattattattatatggatcggggttgcccgcctacagcaggccttataggctttactattatatggatcggggttgccctcctgcagcaggccttataggctttactattttatggatcggggttgaccgcctgcaggaggctttattattatacggatcgggactgcccgcttgcagtaggccatattggctttatatcacatttgagctgaaggagcccctctggagtctatatacacccccgtgagcgtagatgattatatatatattcgggatggacttcccaaggcatggacttgccttacttacgatgattatatatatattcgggatggagtttcccagggcatggacttgccttacctatttatattgtaatgaatttacctagacatggatcttgtccatatcatttacatttggggataaattaccccagggctggattggctttatacgatacggtgtgattgactttcagtcgatgtgtatatatatacgggttggaacacccctgggctggattggccataaactataccgagtgaccgaataatttgtgatccgtatttacatgagatctttcaattgggatctcatattcctcatatcatgcagtattgatctatttctcttgtaccgagtttaactattgaacttgaaagcatgcctatattttgtaccattatttatacttgactgtacctacgaagctcgtcactactttcagcccaaaggttagtcttgttacttattgatttagttgtactcatactacactctgcactttgtgtgcagattcaggtgctcccggatacggcgactgctagatttcaaagttaatcctgttggggactatcaaggtagctgcttgacgtccgcagacttgatttccttcctgtttaattattgcattgttctatattttcagacagtgattttatcagtcagactttgtattcatattagatatttatgtactcactgacaccgggttttgggagtgttatatttgtatttgtgaggtttctttcgctgaatttaatcactttgtttttaaacataaaagatatgggagtatattgagaatgtcagctttcctagtattgagataggcgttatcacgacaagtgagattttgggtcgtgacaagttggtatctgagctctaggttacataggtctcacgagccatgcgcaggtttagtagagtcttgcggattggtacggagacatctgtacttatcttcaagaggctgcagaacccttaggaaaatttcactttcttgtattctatcgtgcggaattgattcagcttcaaacataactctttgaattccttccatgcattcgtatgcgcacatgagcgctcggtatcagttgtgcatcgctgacttgtgattccatgaacgaggttcgagatgtgtattctgtattttggtaatggtccagtctggaggacttgaggccagatttagaccgcagcttaggctctgtagcttcagttgtaacttgtatatttgggctcatatgtccagtaatgtccctacgagtgaaatttgtggctcgatgagtagtagaatggctttgtgatgagtatgatgtaactacaggatgtgtgaaggcgatttgaatgtgacgagaagtgtttccttgaaatgtaaaggaaggccattggaggctttattttcgttttgatgtgacgtacaatctcgagtgtgaacgttttgaaagatctttcacgttgttaaattttgggaaaaaatcaaattcttgtgtctagttaatgagtctggactcagaaagattaagtaatttcatagtaattgtggatgcgaaagggtataacaagatgccaatttgagactaagcaggtgggttatatcctgcggagtaatctatgtaggtatgtaccttatgaagtgaatagagagtttcttttctaccagcggggcgtatgtgttgagacttgaatttgaatctggttgagaaagttgacgtgagtgttaagagaatgaatgcgagattagcgtatgattagggtattttatggttggtgtgtcttgagcttgagaataattttcgttgaactgactgcggtaataaggcagtaataaagcataggtattgtgagttatcaaatattttaatctatagctttgagccaaatggggaagcctgttattgacaattcaattcatggttatgcgtcaatttgttttttgtttggtctgaagtatacttgggaatcagagatgacttgcagagatggagttcgagaatgaatcgagtaaggaaatttctggatacgggttatattgtgctttatgagtatatgaaaatcgtgggatgagtgagttgttatttgtgaattatgcaatgcgcacggagtatgaattttataggtggtattaaagtagagttacttctttgagtgtaattgtgctgatggggcacgtgttttttggcccattttggccatgtaatgtggatttgaacaaagggggtgactctcgagaaagttctaatggattcgagattaatatgtaacaattgagaatttttggcggatnnnnnnnnnnnnnnnnnnnnnnnnnnnnnnnnnnnnnnnnnnnnnnnnnnnnnnnnnnnnnnnnnnnnnnnnnnnnnnnnnnnnnnnnnnnnnnnnnnnnnnnnnnnnnnnnnnnnnnnnnnnnnnnnnnnnnnnnnnnnnnnnnnnnnnnnnnnnnnnnnnnnnnnnnnnnnnnnnnnnnnnnnnnnnnnnnnnnnnnnnnnnnnnnnnnnnnnnnnnnnnnnnnnnnnnnnnnnnnnnnnnnnnnnnnnnnnnnnnnnnnnnnnnnnnnnnnnnnnnnnnnnnnnnnnnnnnnnnnnnnnnnnnnnnnnnnnnnnnnnnnnnnnnnnnnnnnnnnnnnnnnnnnnnnnnnnnnnnnnnnnnnnnnnnnnnnnnnnnnnnnnnnnnnnnnnnnnnnnnnnnnnnnnnnnnnnnnnnnnnnnnnnnnnnnnnnnnnnnnnnnnnnnnnnnnnnnnnnnnnnnnnnnnnnnnnnnnnnnnnnnnnnnnnnnnnnnnnnnnnnnnnnnnnnnnnnnnnnnnnnnnnnnnnnnnnnnnnnnnnnnnnnnnnnnnnnnnnnnnnnnnnnnnnnnnnnnnnnnnnnnnnnnnnnnnnnnnnnnnnnnnnnnnnnnnnnnnnnnnnnnnnnnnnnnnnnnnnnnnnnnnnnnnnnnnnnnnnnnnnnnnnnnnnnnnnnnnnnnnnnnnnnnnnnnnnnnnnnnnnnnnnnnnnnnnnnnnnnnnnnnnnnnnnnnnnnnnnnnnnnnnnnnnnnnnnnnnnnnnnnnnnnnnnnnnnnnnnnnnnnnnnnnnnnnnnnnnnnnnnnnnnnnnnnnnnnnnnnnnnnnnnnnnnnnnnnnnnnnnnnnnnnnnnnnnnnnnnnnnnnnnnnnnnnnnnnnnnnnnnnnnnnnnnnnnnnnnnnnnnnnnnnnnnnnnnnnnnnnnnnnnnnnnnnnnnnnnnnnnnnnnnnnnnnnnnnnnnnnnnnnnnnnnnnnnnnnnnnnnnnnnnnnnnnnnnnnnnnnnnnnnnnnnnnnnnnngtttatggctaaaatctgagatttaagttggatggtgtcgagacttgtggcatttttatatcattatagattttatatttcggtattgggaaggtgaatgaaatggtcttagacccaaataaggtatttttagagtgggtgtttcggttgtggtatttatagggataattatgatgtggtaagactctacagatgttttggtggaaatattcttgggttttggtgacctgcgtggtttggtcgagttagaggaatttagttttaatagcttagttatgtgtagatggatttcaaagtgttcttgatggtttctaccatggtttgaaccaaatattttctactggtgtgggaaacgtgttgtgtattgtgatttcctcctggaaagaagcaagaggaaggtttgtaactaaccgagtatgtaatttgctggtgagtgagagttgataatgggattcatgtgcctatcacatgatagcataatagatgtggtgtgttgtgcgggattaggatttacatgtacaaggtgacagttcagtcttgaaaagaaggtaacgaatcttggacatcatggtcagtttcagatatttcgatgaatgttataactgctcggtaattcctgcgaagggtgcgcatttcagaaggcgtgttgtgttttgacttacggatgttcatcggtattgcagtactcacctggttgatagactgctggtattcaaattatttctatgtggcacggaagaattatgagagtattcctcatgggattatcgtgaatacaagatatgttagtcattttagtgctggagttgggattagttacggtgattcatgtgttcgatggatttggagactgggagttctcagaggcatattgttttagggttacggcctgtttgaggtgagtattttattttaactcagtggaggcactagttgcctttgtgatgactacgcactactagtgcgtatatatatgtgtgaggtttgatcccatgtgctagcatcggggcaattattcagattcgggaaaatgtttaggctattatatccctagagttgatggttaagcgtaacgttatgacatttctcttattcgtacctttattgagaactatctgggttatacttgagttacaaagaggctaattgcctgaataaactgggtagttactatttctgcgttaaatgcaaatttgagttgtgatagcacactttgcacatgcctgctctaaggcgtgttatttattccagcccaggagcatgtgaatcctactttatttatcatatacatgtgtacttatttgattgctcatgtatgatatgcttggattagaggcctgtgaccatgccagaagaattatgttattggaacgtgagttgtccgtgcggatccatatactgatattattggcacgtgagttgttcgtgcgcgtccagatattgatactatagcacatgagttgtccgtgtgagtgatgttaatgtgagctctaaaagagctggtactgttattaaatttgtgtgtcttggttctactatatatataatgatcttatagcattacaattgtggtggtgcttgttgaacttacaataacgttctctactttgagacatcttccattttggggtacaaggttggcgcgattgtggattggattgtattgctgtgacatgtcaatgagatagttttgtttaataatataagatcattggacctagaatgggtactatcaggtttgattacagcatattgagaggataatattgaaagtcggcttacgagaagattgtggttctgggtagggcgaagagagctccatgactagttgatttgatgagtggttatgagtttttgattgtttcttttattatcaacagtataccaaggttgtgggatgaagtttggttcgatatggggtttaatactagtacttggttggttttggagcagttattatgattaggaattatgctacgagtatgcgagttgtgtagtaggttatgtgattgtatctgggattatggttatggttggatacagcttgttcaggtttatacaatgggtaaatgtgggattcaggtcttgaaaaaaattatggatgttaggaatatggctccaagattttttggctaaggttaaattaatgattttcagttatgttgtgttttcaagcctatacaagttacacataataggatggcgtgggatcaccccaagtatgtgcgtggtagatggaatagtgatgtgatggcttggaatcaactctaggcacgtttgaggatgaacgcatatttaagtgggggagaatgtaacgacccggccggtcgttttgagtaatacaaccctgtttatccgtttttgctttacagttgttttatgacttgctgggttaattggttcgggtccggtgaggttttggaatcaattgaaatacttagttccaaggcttaaagcttaagctggaaaagtcgatcggatgttgacttaggtgtaaatgacctcggatttaaatcctgataattccaatagctccgtacggtgattttggagttaggagcgtgtctgaaaaattatttggagggccgtaatggaattaggcttgaaatggcaaaagttgaatttttaaaagtttgaccgaggggttgactttttgatatcggggtcggaatccgattctggaaatttgaataggtccgtaatgtgaagtatgacttgtgtgcaacatttgaagtcattccggattggtttgatatgtttcagcacaagatatagaatttgaaagttcaaagttcatagcttttgatatgaggtgcgattcgtcgtttcgatgttgttaggtgtgatttgaggcctcaagtaggtctgtgttatgttatggaacttgttggtatattgggacaaggtcccgagtgactcgggtgagtttcggacgaggttcggcgcattttggaagttttggctaaagccggaaattttctggttctggtgtgatcacacctgcggaaatggactcgcacgtgcgatggtcgcaggtgcgacaaggcagccgcagaagcgaagggagcaaaagcagcccaacgtgcgcagaagagaccttcgcaggttcgagcttcgtccgcaaaagcaaatgtcgcagatgcgacttttccaccgcagatgcggaagtcgctgggcataagcgttaaatttggggtttcgccatttttcaccattttcgaattttggagattcggtttgggcgattttggagaggaattttttcacacaactttgggtaagtgttcttgactcccttgtgattatattccatgaattaatcctcattttcggcattagaatattgatttttcaagagaaataacaagaattttttacaatttcataaaatgaattttcgagattagaacaccgtttaagagtcaaatttgagtgaaatttgtatggttgaacttgtaattggatgggttgtcatattttgtaagttttatcggattccgagacgtgggacccgcaggcaatttttgagctaaatttcggattttgttggaaaattagtattttcttatggaattaattccaataaattttattgactgtatcgaataatttatggctagatttaaggcatttagagacaaactgacaaggcaagggcctagcggagtaaagaattacacggtttgaggtaagtaacacttctaaacttggttctgagggtatgaatccccaaatttggtatgatataaannnnnnnnnnnnnnnnnnnnnnnnnnnnnnnnnnnnnnnnnnnnnnnnnnnnnnnnnnnnnnnnnnnnnnnnnnnnnnnnnnnnnnnnnnnnnnnnnnnnnnnnnnnnnnnnnnnnnnnnnnnnnnnnnnnnnnnnnnnnnnnnnnnnnnnnnnnnnnnnnnnnnnnnnnnnnnnnnnnnnnnnnnnnnnnnnnnnnnnnnnnnnnnnnnnnnnnnnnnnnnnnnnnnnnnnnnnnnnnnnnnnnnnnnnnnnnnnnnnnnnnnnnnnnnnnnnnnnnnnnnnnnnnnnnnnnnnnnnnnnnnnnnnnnnnnnnnnnnnnnnnnnnnnnnnnnnnnnnnnnnnnnnnnnnnnnnnnnnnnnnnnnnnnnnnnnnnnnnnnnnnnnnnnnnnnnnnnnnnnnnnnnnnnnnnnnnnnnnnnnnnnnnnnnnnnnnnnnnnnnnnnnnnnnnnnnnnnnnnnnnnnnnnnnnnnnnnnnnnnnnnnnnnnnnnnnnnnnnnnnnnnnnnnnnnnnnnnnnnnnnnnnnnnnnnnnnnnnnnnnnnnnnnnnnnnnnnnnnnnnnnnnnnnnnnnnnnnnnnnnnnnnnnnnnnnnnnnnnnnnnnnnnnnnnnnnnnnnnnnnnnnnnnnnnnnnnnnnnnnnnnnnnnnnnnnnnnnnnnnnnnnnnnnnnnnnnnnnnnnnnnnnnnnnnnnnnnnnnnnnnnnnnnnnnnnnnnnnnnnnnnnnnnnnnnnnnnnnnnnnnnnnnnnnnnnnnnnnnnnnnnnnnnnnnnnnnnnnnnnnnnnnnnnnnnnnnnnnnnnnnnnnnnnnnnnnnnnnnnnnnnnnnnnnnnnnnnnnnnnnnnnnnnnnnnnnnnnnnnnnnnnnnnnnnnnnnnnnnnnnnnnnnnnnnnnnnnnnnnnnnnnnnnnnnnnnnnnnnnnnnnnnnnnnnnnnnnnnnnnnnnnnnnnnnnnnnnnnnnnnnnnnnnnnnnnnnnnnnnnnnnnnnnnnnnnnnnnnnnnnnnnnnnnnnnnnnnnnnnnnnnnnnnnnnnnnnnnnnnnnnnnnnnnnnnnntttctgaatattctccacgtgttagagaaattgagttgaggctcctattaaagatcatgtttaggttacgtgccaatattttgggacccatggggtcgtgttgcttttgtattaatttttaaaaaaaatatacatttcatactcagtaataattttcctttattaggatatttatgggatcgagctgcgcgacgcagcaggccataatagctttatacattattattatatggatcagggttgcccgcctgcagcaggccttataggctttactattatatggatcgagattgcccgcctgcagcaggccttatatgctttactattttatgaatcggagttgtccgcctgcaggaggccttataggctttattattatacggatcggggctgtcggcttgcagtagtccatattaactttatatcacgcttgggcttaaggagcccctccggagtctgtacacacccccagtgagtgtagatgattatatatattcgggatggacttcctagggcatggacttgccttacttacgatgattatatatatattcgggatggattattccagggcatggacttgccttacttatttacattgtaatgaatttacctagacatggatcttgtccatatcatttaccccagggctggattggccttatacagtacggagtgactgactgtcagtcgatgtgtatatatatacgggttggaacacccctgggctggattggccgtaaactgtaccgagtgaccgaaaattttgtgacccgtatttacttgaggtctttctactgggatgtcatattccttatatcatgcaatattgagctatttcatttgtaccgagtttaactgttgaacttgaaagcatgcttacattttgtaccattatttatactggattgtacctacggagctcgtcactactttcagcccaaaggtcagtcttgttacttattgagttagttgtactcatactacactctacaccttgtgtgcagatctaggtgctcccggatacgacggctgctagatttcgaagttaattctgttggggactatcaaggtagctgcttgacgtccgcagacttgattcccttcctgtttaattattgtattgttctatattttcagacagtgattttatcagtcatactttgtattcatattagatgttcatgtacttagtgacaccggattttgggagtgttatatttgtatttgtgaggtttcttccactgaatttaatcactttgtttttaaacataaaagatatgggggtatattgagattgtcggcttgcctagtattgagataggcgtcatcacggcatgtgagactttcggtcgtgacacttgcttacctttgtttcgattgtcattagtcaatagctttagcttcttagttaaatttagttagacatcttataatctcaattgttgattatcttggatagcaaccaaactcgaaactacaagaatatgtttgaaatccaatccttgtggatacgatattatattatactatatttgattagcgagcataatttaggtgtgtgtttcgagctagtctaatttttgcaacgttgccggggatattatactatactatatggatatggttaggagcatgatgagtaattccccattacctaaatcattgtggatgtatgctcttataaccactgtatatttattaaatagggtttctagtaaggtagttctaaagactcattttgaattgttgatggaaaggaaacctagtttaaggcacttgcatttttggggttgcccagcggaagctagagtttataatccactaaaaaaattagattctcgaacagtaagtggttactttattggttacccagagaaatctaaagggtatgtgttttactgtccaaagcatagttcgagaatagttgaaacctggtaatgcaagattcattaagaatggtgaagttagtgagagtgttgaaaaacaaattgtgaaaataaaagaggtgagtgtcaatattccattacccacgaatgtgcctacttccacacaaataccaaatattattcaagttgttgaagagcactttgacaacaacaagcaacatttggatgaaaaacttcatgagaaaactaactcacaaatatgtgacacaaataaaccataagaaatgccattaagaaaatctcaaagagttggaaaatcggctatttcggatgattacgtggtttatttgcaagagtcagtttttgacattggtcttaataaggatccggtttcatttttacaagccatagaaagtaatgagtctgacaaatagattgattccatgaaggaagatttaaaatctatggaatgcaataaagtttgggatctcgttgaattgccagaaagttataaaagaatcgggtatagatggtatataaagtttaataataccataacatcttttagatttgtgaaaaataccgttgatcggtgtatataccaaaagatcagtgggagcaagtttatatttttagtcctatatgttgacgatattcgacttgctgctaatgatttaggcatattgcgtgagactaaagattttctctttaagaattttgaaattaaatatatgggtgaggcatcctatatgataggaatagatatattccgtgatagatcacaaggattactggaattgtctcagaaaggttatatcaaaagcgttctagagagatttaacatgaacaactattcagcaggaatcgttccaattcaaaagggggacacatttagtctcatgccacgccctaagaatgatgaagaacgaaaggaaataaaattagttccttgctcttctattattggtagtctgatgtatgctcagacttgcccaagacaagatatgtgttttgctatcggaatgctgggaagatatgagagtaacccatgaattgatcactggaaagctgcaaagaaagttttgagttacttgaaaggaacgaaggattacatgctcatgtataggggatccaagcatttggaagttactggatacttgaattcagattttgttggatgtattgacactagaaagtccacgtttggttatttttttcaattagatgaaggagcaatatcgtggaagagtgccaaacagtctagcattgctgcaaccataatggaagcagaatttttggcatgttttgaagccacaaatcatgcattatggctgcgaaactttatttcagggctaggggttattgacaccattaccaagccgctgaaaatttattgtgatcattctgtaacagtattcttctccaagaacgataagtactccaatagatgtgccaaacatataaaattacagtactttaccgtcaaggaggaagttcagaaacaaagagtgtcacttaagcatattagaattgatctcatgattgcagattcgttaacgaaaagtttacaaccaaagatatttaaagaacatgtatatagagtgggtcttgactgtaattatgattgatgtatttatggtgttttgacactctaagctcatttatgtgtttctgatatacattaataattttttatttctcataatggcgtacacattaatgttttgagatattacaggataagtcacaacgagatattattttggaccataatattttatagcttatggacttggtatgatgagttgctaatgttatagtatatggaagggagtatgtagacaaaatatgtataaccgccataactcatatttagtagtttatcgtattatggtatttatgatggacattatagaagagatttgtttatgcgcaactaatgtttatattattaaatattaatattatgtgatttttgggccaagtgggagaatgtaagtttttttttacgtgtgtgtggcccaatagatttaaggcctgtaagtaatatttaataaaagacaaatctggttcttctgatcgattacttgatggatgcaccggattaagtaagaacctttatagattggtcatctccccacccattagggtcaccacctattctattcttctttttcatcactaaagtcagtaataacgaaagttagggcaagaggcgagataccaatttagcaattaacgcttccgcttcatgctaatggcttccgcttcaggtattttttttgcatcaattatatataagattatcatattcaagatcctggtatgaattaaagtttatgtttacaatatgtactagtagtatcctcatctttttatcactactattattaacagtaggagtaggaataacagtatgtgttgataatacctccgtcattatctttataattagttaagaaaaaggtgttatttttattttgcaatttatttttgaaaatattacttagttaaggtagggcagtaggttgtatctttaatagaatattccagtcatataatacgtttaataacgacaaggtcatttgtataagaaaacatttaatggattagcataaatgattaatttgataaaattcagggatatatttggagtacttttacactaatgacaatacacaaagagtgtgtttggtacgatggaaatatttttcggaaaatattttttattttccactgttaggctgaacaaaatagtttggaaaatattttcctacaaatcacattttcttgaaatcggatgaaaatgacttcccgagaaaaagttaggaaaatattccaaaaacatcacctaccctcacatgtaaccccaacccccttcaacttcaatttttgtttttttttcatttttctgcgccgcccacccccaaccctgtataccctcccccccnnnnnnnnnnnnnnnnnnnnnnnnnnnnnnnnnnnnnnnnnnnnnnnnnnnnnnnnnnnnnnnnnnnnnnnnnnnnnnnnnnnnnnnnnnnnnnnnnnnnnnnnnnnnnnnnnnnnnnnnnnnnnnnnnnnnnnnnnnnnnnnnnnnnnnnnnnnnnnnnnnnnnnnnnnnnnnnnnnnnnnnnnnnnnnnnnnnnnnnnnnnnnnnnnnnnnnnnnnnnnnnnnnnnnnnnnnnnnnnnnnnnnnnnnnnnnnnnnnnnnnnnnnnnnnnnnnnnnnnnnnnnnnnnnnnnnnnnnnnnnnnnnnnnnnnnnnnnnnnnnnnnnnnnnnnnnnnnnnnnnnnnnnnnnnnnnnnnnnnnnnnnnnnnnnnnnnnnnnnnnnnnnnnnnnnnnnnnnnnnnnnnnnnnnnnnnnnnnnnnnnnnnnnnnnnnnnnnnnnnnnnnnnnnnnnnnnnnnnnnnnnnnnnnnnnnnnnnnnnnnnnnnnnnnnnnnnnnnnnnnnnnnnnnnnnnnnnnnnnnnnnnnnnnnnnnnnnnnnnnnnnnnnnnnnnnnnnnnnnnnnnnnnnnnnnnnnnnnnnnnnnnnnnnnnnnnnnnnnnnnnnnnnnnnnnnnnnnnnnnnnnnnnnnnnnnnnnnnnnnnnnnnnnnnnnnnnnnnnnnnnnnnnnnnnnnnnnnnnnnnnnnnnnnnnnnnnnnnnnnnnnnnnnnnnnnnnnnnnnnnnnnnnnnnnnnnnnnnnnnnnnnnnnnnnnnnnnnnnnnnnnnnnnnnnnnnnnnnnnnnnnnnnnnnnnnnnnnnnnnnnnnnnnnnnnnnnnnnnnnnnnnnnnnnnnnnnnnnnnnnnnnnnnnnnnnnnnnnnnnnnnnnnnnnnnnnnnnnnnnnnnnnnnnnnnnnnnnnnnnnnnnnnnnnnnnnnnnnnnnnnnnnnnnnnnnnnnnnnnnnnnnnnnnnnnnnnnnnnnnnnnnnnnnnnnnnnnnnnnnnnnnnnnnnnnnnnnnnnnnnnnnnnnnnnnnnnnnnnnnnnnnnnnnnnnnnnnnnnnnnnnnnnnnnnnnnnnnnnnnnnnnnnnnnnnnnnnnnnnnnnnnnnnnnnnnnnnnnnnnnnnnnnnnnnnnnnnnnnnnntacaagttcaaaatcttacgagttccaaaattatgagttcggaggtttatgtgtttggaagtttacggatataaaaattatagagtttacgggttaaaagtttgcgggtttgaaagtttagcggttcaaaagtttatgaaaattgtgggttcagaaggttattggttttaaagtttatgacttcatgtttattgtatctaaattatttatgaatactcttgaaagttattttcgttaatgacctggccggtcgttacgagtattataaccccgactccccaattactgctcaaattgtgatttacagttgttatttggctttcaggggtaattggttcggtcccggtgaggttttggaatgatttgtaatatttagttccaagctttataacttaagttgaaaaggttgaccggatgttgatttatgtgtaatgaccccgaaaaaattttgctaaggaaattaaggtttcgtggtgctgaactaggctcagacgttttgagttgaacaagctggtgagcaaaggaaaattttggaataaataaatacatgtctacggcccactatgcgatcgtagaatcactccacagaccgcataatggccgcagagtgaagcagattaggccgagtttggagatcaggtttgcggcacattgtgcaatcgcataccagttctatgatgcattatgcgaccgcagaactggtatgcgggctatataatgaccgcagactgaagtagtgttgcccagttctggagggcctatttgcgacccattatgtgggccgcagaagcattatgcggtcgcatagctgaccgcaaaatgtgtttcagagcttcatttttctggttttataaacctgaccccattcttataaaacactattagggtcattttgaagggtttcatgtgatattttagagagaggtgagagcatcttagagagagaaaatgaagacctagtcatttgttgtaatgacccgactggtcggtttgggtattacagccccgttccccaatttactactcaatttatgctttacagttattatgtgacttgccggggaaataggttcgggtccggtgaggttttgaaatgaattaagacacttagtctctaagataaaaatttaagttgaaaagattaaccggatgttgacttatgtgttaacaacaccggaatagaactttaatgattccaatagctttgtatggtgattttggacttaagatcgtgtccaaaaaattaatcagaagtccgtggttaaattaggcttgaaatggcttaaataaaattttaattttgaaagtttgaccggggagttgactttttgatatcggggtcagaatccgattctagaaatttgaataggtccgttatgccatttatgacttgtatgcaaaatttgaggtcaatcggacttgagttgataggtttcgacatcgaatgtagaagttgaaaattcttagtttcattaagcttgaattgtgggtatgattcgtggttttagcattgtttgatatgatttaaggtttcgagtaaatttgtatgatgttttagtacttgttggtgtatttggttgaggtccccggggcctcgggtgattttcggatgattaacagatcaagaattggagttgggaggttgctgaagctgtagcccctctggagtgatcgcacatgctagggtcttggccataagtgcgatgccgcatgtgcggagttggaggatgtcggcagaggtcgcaggtgcgatgggatttctgcacctacaattgcgcagatgcgggcagggatctcagaagcagaggctcgctgggtaagtgaagtccgcagaagcatgtttctttccgcgaaagcggatgcgtaggtgcgagcccgggctccgcaagtgcggaaatgcctgggcaatgttaaaaatgagggtttccaagatttttctcattttggagctcgatttggacgactttggagagggagtttttcacacaacttggggtaactatcattgactcccttgtgattatatttcttgaattaatcttcatttttggtgtattattattgaatctgcaagagaaatcgaacgaaatttttataattccataaaatgaattttcgagttttgaatatcgattcaaagtcgaatttgagtaaaattagtatgattgaaatcgtaattggatgggttgtcgaattttgtgagtttcgtcggattccgagacgtgagccccactgtcgatatttcgagcggagttaggaattgttttattaattgataaattgcaagcattagagtgtattttgattaatttacacgttgtttgactaggttcgaatcgcttggcatgtaattgaggagatatgaaggtgtttcgaggttgatatacgcggaatggaatttttggagtattgtttagcttgctcggcattagattcgtcttattcgaggtaagtaacacttctaaacttggttctgagggtatgaatccccgaatttggtgttatataaattatttggatatgacgcacatgataggtgacgagcatgtggacgtacaccatagaaattgtgacttgaataaatcctgtgaagttctaaaattaaagaatccacgtgttaagaaattgagttgagactcgtattaaatatcatgattacgctacgtgccgatatttttggacccacagggtcgtgttactgttcaatttaattatattgaaatatatatatatatttttcatactcagtcatgttcattcattttgaggatatttatgggatcggggctgcccgcatgcagcatgccatatcgggtttatatatatatattatatggaacggggctgcccgcctgcagcagaccttgtaggctttatcattatatggatcggggctaccctcctacagcagaccatattgactttatatcacgcttgggctgaaggagcccctccggagtctacaccccccacagtgagcatatatatatatatatatatatatatatatatatatatatatatatatatatatatatatatatatatacaggatgaatttcgcagggcatggacttaccttacttatttgtattcatgatgaatttttctggctatggatcttgtccgaaacatttacatttggggatcgtgcctacatttctgtaccgttatttatatattggactgtactgcggagatcgttactactttcagcccagaggttagtcttgttacttattgagttgtttgtaatcatactacactctgcgcctcgtgtgcagatccgggtgcttccggatacggcgactattagatctcgaggtgttatcagttaaagactatcaaggtagcttcctggcgtccgctgaccctgactctctctcttcctttcagttattgtactgttctatatttttaaatagtgtttttatcagtcagactttgttatcatttagatgcgcatgtacctagtgacaccgtgttttgggagtgttttatatttttcaatggaatttaaatattatgttttcaaacgtgaagaaattgagttttatggagattgtcggcttgcctagtattgtgataggcgccatcacgacaggttaggattttgggtcgtgacaaattgctatcaaagcctaggttacataggtctcacgagtcatgagcaagtgtctagtagagtcttgtcgatcggtatgatgacgcccatacttatctttgaggggctacaaggcattttaggataaacttttcatcattatctccttattgtgcgggattgattcggcttgaaatataaatttttgaattccttccatgaattcgtgtgcgcatgtgagcgctcagtatcagctatgcaccaccgacttatgattctatgaacgaggtttgagatgagtattatgtgttttggtgatggtccagtctggagaacttgaggccagggttggaccgcagcttaagctcggtagcttcagttgtaacttgtacatttggactcatatgtccggtaatgtccctaggagtggaatttgtggctcgatgagcggtgaaatggctttgtgatgagtatgatgttgactgcggggcgtgttaagatgatttgaatgtgacgagaaatattaccttgaaatataaaaagggccattgggtatttgattttcattttgatgtggcgtacagtctcgagtatgaatgttttgaaggacctttcacgttgttaaattttggtacaaattaaattctcatatcttgttaatgagtttggacttagaaagattatgtgattgcatagtaattgtcactgcgaaagggtataacaagataccaatttgaggctaagcaagtgggttatcccctgtgtagtaatctatgtaggtgtgttccttataatgttgagtgaagagtttgttttcttccagcggggcgtatgtgttgagatttgaatttaaatctggttgggaaagtttgcttgagtgtcaagagaatgaatgcgaatttagcggatgattgaggtatgtttatggttggcgttgcatgagcttgagaagaattttcgttgaactgattgtggtattatggcaataatagagtatgagtattgtgagttatcgggtgttttaatctatggctttgagccatgtgggggagcctgctattgacaattcaattcatggttatatgttaaattttagttttggtctgaggcatacttgtggattacttatgacttgcagaggttgagatcgaggatgactcgattactgaaattcctaaatacggggtatattgcgctttatgagtatatgaaaatcatgggatgagtgagttgttatttgtaaatgatgtagtgcgcacagagtatgaatttgatcggtggtgttaaggtatggttacctctttgagtgttgttgtgctaatggggcacgtgtctttcagcccgtttgggcggtgaaatttagatttgagcaaagtggatgactcccgaaaaggttataatgggttcgagatttatatatagcaatcgataatttttttggatttgtgtatggatagaatctgagatttacaattaatggtgccaggcttgaggtaattttgtatgactatggattctacattttgtataagaaaggtaaaaagaacaattttaaattcacataaggtattttcagagtgagtgttacggttgtgttatttatggaggtgcttaagaagaatacaatgtcttatgggccttaaggcagtgtgattttatgttaggatgtcttgtattgagctttgggtaaggatcatggaattttgacagagaaaagtgtcaacttgagggtaattcagaataaactcagagaaaataggatgactgggtagtaggttggaccagtatggtatgattggtacttttagtacctatgaagtggtgaggctctacagatgttttagtgaaaatattcttgggttggtgacctgcgtggcttggtcgagttagaggaatttagttctgatagcttggttatatgcaaatggatttcacagtgttcttgatggtttctaccatggttcgaactagatattttttaccgttgtgaaggacatgttgtgtatcgtgatttcctcacggatgagagcaaatggaaggtttctaactaaccgagtatgtaatttgctggtgactcagagttgataaaattctcgtgcttctcacatgattgcatgatagatgcggtgttgggtgggattaaaatttacatgtacaaagtggcagttcattcttgaaggtaagttcccaaattttggacaacatggtcagatttagatatttagatgaatgttataactgctcggtaattcctgagaagggtgcgcatttcagaaggtgcattgtgttttgacttacatatgttcattgatattgcggtactcatctagttgatagactgttgatattaaaattattgctatgtgtcacgaaagaattatggaagtattcatagtgggatgatcgtgcatgaaggatatgatagtcattcgagtgttggagttgtgaccagttaaggtggtttatgtgttctatgaatttgggggactgggagttctcataagcaaattatttcaaggttgcggcttgtttgaggtgaatattttatttaaactcagtggaggcactaattgtgttaattatttatgatagttgcgcgctacgagtgtgtacatatgtgaggtttgagccatatgcgggtatcagtgcaagtattcatactcggaagaattcttaggcaaagatatgcctagaattgagtgttaagcgtaaagttataatgtttctcatattcgtacctttgttgggtactatctgggctacacttgagtttacaaagaggctaactccccgaataaattgggtagttactatttctgctttaacttgcctatttgagttataacagcacactttgcacatgcctactctattgtgtgttatttatactagtccaggagcatatgaattttattttatttatcatatacatgtgtacttatttgattgctcctgcattatatgcttggactggaggcctgtgaccatgccgggtaattgatattattagcatgtgagttatccatgcaggtccaaacatttatattattggcacgtgagttgtccgtgcgggtccaaatattgatactatagcacgtgaattatttgtgtgtttgatattaatgtgagctctaaaagagttggttaccgtttatagattcgtgtgtcttggttatactatatatatgatgagcgtatagcattgcaattatggtggtgcttgttgaacttgcaatacaattctcttctttgagatatttttcatttttgggtacacggattgcgcaattgtgacttgagttatattggtgtggcatgtctgtgggatagttgtgtttaataatatatggccattggacctagaatgggtactatcaggtttgattatggtatatttgtgaggatgacattgaaagtcggcttagaaagtgattattgttctggttggggcgagaaagctccatgacttgttgatatgataaggggtaatgagattctgcgtgtttctttaataatcaacattgtacgaaggttttggaactaggtttggcttgatatggggtttaatactagtaccgggttagtttggagtagttactgtgatcgagaatggaactacgaccatgcgagctgtgtagtatgttttgtgattatatctggggttatggttatggtttgacacagcttgttcagagtcatacagtgtgtagatgtgagactcgtgttttgaaaagaaattctaaatgttggaaattgaattccaaggtttatgggctaaggttaaattaatgactttcaattatgttgggttatcaggcctatataaaatagggtgacgtgggatcaccctcgggtatgtgcatggtatggtggagcagtgatttaaaggcttaggaacaactcttggtacgttcgaggacgaacgtatgtttaagttgggtattacaacccagttcccctatttacatctcaaattatgctttgcatttgttatgtgactttccagggaaattggttcaggtccggtgaggttttgaaataaattcagacacttagtatccaagattaaaacttaagttgaaaagattggccggatgttaacttatgtgtaaacaatatcggaatagaactatgatgattccaatagctatgtatagtgattttggacttaggagcgtattcggaaaattatttggaagtccgcaattaaattaggcttgaaattgctaaaatagatatttaagtttggaagtttgaccagggatttgactttttgatatcgaggtcagaatctgattctggaaatttaaataggtctgttatgtcatttatgacttgtatgcaaaatttgaggtcaatcggacttgatttgataggttttgacatcgaatgtagaagttgaaaaattttagtttcgttaagcttgaattggggaatgattcgtggttttagcatttttggatgtgatttgaggtttcgactaagttcatataacgttttaggacttgttggtgactttggttgaggtcccgggggcttcgggtgagttacggatgattaacggatcaagaattggagttgtgaggttgctgaagttgcagctcctctagtatgattgcacctgcgagggtcttggacacaagtgcgatgccgcaggtgcggcagctcgagcactggtgctgtcacgacccaaaattctaaccagtcgtgatagcacctatctcaatactaggcaagccaaaatctcaatgaaccacaacttctttcaagtctgaaaatataatattcaaataacatccacaaatcttacaattaccgatacaaccactcccaaaacattgtgtcactgagtacatgagcatctaattatgaatacaagtctgaaaaatacggtccgtaacagtctgagaccaaatatagtaaataaggagatagggaaggagagacaaggtctgcgaaacacggcagctacctcagaatctccagaaaatcaactatgtgaaagaatcaacacccgctatgcccgggaacactggatctgcacacgaagtgcagggtgtagtatgagtacaaccactcagcaagtaacaataataaataaggaactgaagatagtaacgagctacacagttatggttcatttccagtaattccagcaaagaatagacatgctatgaaatctggcagtttaatgtcaaatcaatttttatacaattcttgttcatgaaattcgtatatcaacaatctttcagagatttcacaacaatgacagatagcaactaagtgcaacaacaaatgaaaatcaagtacaacctcttaggannccactgggctcccaaccctcatcactccctgggctcccagccctcatcactcactctcaatgggtacccgcgctcactggggtgtacagactccggaggggctcctacagcccaagtgctataatctccacggataactcacgtgccataatataaatatctagatccgcacggccaactcacgtgctatagtataatataatgattcgcacggacaactcacgtgctatagtaaaatataaggatatgtacggccagatcacgtgttgcacggacaactcacgtgctatgatatcaatatctcacaatcaggccctcagcctctctcattcataaatctctctagtctctcgggctctcattaaccatgaaatcatcccaaacaacaatgatatgatgtatcaataataataacagagactgagataaaatatacaagtaaatacatagactgagtacatatagcatttagcaggcaattcaacaagtacgcgacctctgcgggtcccaacagtactatcacatagcctaagcatgatttctaacatgatttacagtcaaattttatcaacacatagagagcatatagctaacaacaaattattcaactttacagttttccgggacggaccaagtcacaatcccctcggtgcacgcccacacgcccgtcacctagcatgtgcgtcacctccaaaataatcacatgataccaaaatttgggggtttaataccttcaggaccagatttaaaactgttacttacctcaagccgtgaaattcttattctacaatgtcctttcctcgtgaattggtctccaaacgtctcaaatctagccataaataattcgtttcagtcaaattaatttattggaattaattccataagaaaatgctagttttccataaaaatccgaattttagctgaaaaatcacccgtggggcccacgtctaggaactcgacaaaagttataaaattcgaaagcccattcaaccacgagtctacccataccaattttaccaaattctgacctcaactcgatcctcaaatctacaaatcttatttccaaatttctaagttccaaaatcatgtaatctagtcggattattcgatgataattcaatattatggagtagaaatgatcacaatggacttacctcaagttgttccttcaaaatatatcaaaattcgcctctcctcaagctccaatttgtcaaaaatggcgaatgggacgaagtccatgtttatataattctgccgagacaacctcgattctgcctcgatcttgtccttctatcgaggtcctcgatcctgggcctcggtcctggccctcgatcctaagcctctatcctggccctcgatcctaagcctcgatcctggccctcgatcctgggcctcgatcgtggcttcgatcctgatcctcgatcatggtcctcgaccctagccttcgatcatgtcttcgaccctgccttcgaccgtgaccctcaacactgggctcgatcatggcttcaatcgtggccctcgaccctgggctcgatctgggctcacatctgggctcgattctgagagatttctgggctcgaatctggcacaagaaatttccaacagaaggaaattgcagcagctgttgtagttcaatattttatccgttaaccatcagaaactcacctgaggccctcgggacctcaaccaaatataccaacaagtcctaaaacatcatacgaacttagtcgaatcctcaaatcacctcaaacaacgctaaaaccatgaattacgccccatttcaaggctattgaactttgaaatttctaatttttacaaataacgccgaaacctataaaatcatgtctgattgacctcaaattttgcacacaagtcattaatggcataacatacctattaaaattttcagaatcggatttcgaccccgatatcaaaaagtcaacccctcggtcaaacatcccaaaaattcaactttcggcatttcaagtctaattcctctacggacctccaaaaattcttccggatacgctcctaagtccgaaatcaccatacggagctatttgaattatcaaaattcaaatccgaggtcgtttacacattagtctatatccgttcaatttttctaacttaaaatttttaattatgagactaagcatctcatttcattccgaatttcctccggacccgaatcaactaacccggtaagtcttaaaacaactgtaaagcataaattgagcagtaaatgggggaacggggatgtaatactcaaaatgaccaatcgggtcgttacattctcccccacttaaacatatgttcgtcctcgaacgtgccaagagttgtttccaagcaatcaaataactattccatcttaccacgcccgtacccgggggtgatcccacgtcatcttattctatataggcctgtcaacataacacaactgaaaatcattaatttaaccttagcccaaaacttggagcccaatttgtaacacctagaattctttccaaaatctaaatctcacatctacaccgtataagtctgaacaagttatatcaagccatagccataaccccagatataatcctattacatactacacaactcgcatactcgtagcaccatttctgatcacaataactacnnnnnnnnnnnnnnnnnnnnnnnnnnnnnnnnnnnnnnnnnnnnnnnnnnnnnnnnnnnnnnnnnnnnnnnnnnnnncaaaaccaaccaagtactagtataattgcattcaacaaaacctcattctaaaaccttcgtatactgccactgatgaaagaaacaatcaaaaactcataaccactcatcagatcaactagccatggagctctatcgccccaacaagaactataatcaagcctgatagtacccattctaggtacaatgaccttatattattaaacacaattatcccatagacacgccacattaatataacttcagccaccgctgcgcaatccgtgtacccaaatatgggagatgtctcaaggaagagaaccatattgcaagttcaacaagcaccaccacaaccacaatgttacaaccaactccttaaatttcatgaagaggataaccgtaggcgtatatgcacaattgtagaggaaggaaattaatgaatcagataaattaccatagaaataaaattcctatacacggcacagataactcacgtgccaataatatgaatcgcctggcatggtcacaggcctccagccccagcatatcatacatgggcaattaaacaagtacacttgtatatgataatgaaataagattctcatgctcctggactggtataaatagcacgccatagtgtaagcatgtgcaaagtctgttgtcacacttcaaatcggcaattttatgcagaattagtaactatcccgtatatttagggaatcatcttctttgtaacctcaagtatagcccagatagttctcaacaaaggtacaaatatgagaaatgttataactttacacttaacagtcaattctaggcatattatagcctaagcattcttccgagtatgaatacttgctctaatgcccgcacatgggctcaaacctcacatatatgcacattcataacgcatagctattacaaataattaacgcaactagtgcctccaccgagctttaaataaaatagtcacctcaaataggtcgcaaccccgaaacaatatacttctgagaactcccaatctccaaattcatcacatgaatcatcgtaactgatcccaactccaacactaaaatgactaacacatcttccattcaagataataccatgaggaatactttcataattctttcgtgtcacatagcaataatttgaatatcagcagtctatcaaccaggtgagtactgcaataccgatgaacatccgtaagtcaaaacacaatgcgccttgaaatgcgcacccttctcatgaattaccgagaagttataacattcatcaaaatatctaaaactgaccatgctatccaacattcgttaccttctcttcaagactgaactgtcaccttgtacatgtaaatcctaatcccgcacaacataccacatctattattccatcatgtgacaagcacaagaatcccattatcaactctgagtcaccagcaaattacatatctcattagttagaaacctctctcttgcttctttccaggaggaaatcacaatacacaacacatttcatacaccagtagaaaatatctggttcaaaccatagtggaaaccatcatgaacactttgaaatccatttgcacataaccaagctatcagaactgaattcctctaactcgaccaaaccacgtaggtcaccaaaacccaagaatattgccaccaaaacatctatagagtttcaccacatcataattatccctataaatacacaaccgaaacacccactctgaaaataccttatgcgaatttaaaattgttcctttttcctttattatactgaaatgtagaatccatagtcaaacagaattaccgcacatcctgataccatccaaatgtaagtaactgattctagtgatatacaaatttgaaaaactttcaattaccacaaatacattttgaatccattagaaccctctcgatagtcattcactctgctcaaatttaatttactccaccccaaatgggccgaaagacatgtgctcctttagcacaatcaacactcaaataagtaaccctggcttaacacggccaatcaaattcatacttcgtgtgcactacatccttcaaaataataacttaatcattccataattttcatattttcataaagtgaaatgtaacccgtatccaggaatttacttacccgagtcatcctcgatctccacctctgtaagtcataactaaaccgcaagtatgcctcagaccaaaactaaaatttaacatatatccatgaaattgaattgtcaatagcagactcctctgcttggctcaaagccatagaacaaaaaactcgataactcataacacccatactttattactgccataatactgcagtcagttcaacgaaaattcttctcaagcttatgcaacacccaccataaaatacctcaatcnnnnnnnnnnnnnnnnnnnnnnnnnnnnnnnnnnnnnnnnnnnnnnnnnnnnnnnnnnnnnnnnnnnnnnnnnnnnnnnnnnnnnnncgacaatcaagtcaactttctcaaccagattcaaattcaaatctcaacatatacgccccgctggtagaaaagaaactctccactcaacattataaggagcacatctatgtagattactccgcaggatataacccacctacttaatctcaaattgccatcttgttatacccctttgcaaccacaattactatgaaatcacttaatctttctgagtccaaactcattaaccagacacgagaatttaatttgccccagaatttaacaacgtgaaagaactttcaaaacattcacactcgagattgtacgtcacatcaaaacgaaaataaagcacccaatggccttcctttaaatttcaaggaaacacttctcatcacattcaaatcgtcttatcacatcccgcagttacatcatactcatcacaaagccattcaaccgctcatcgagccacaaattccacttgtagggacattaccgtacatatgagtccaaatatacaggttacaactgaagctaccgagcctaagttgtggtctaaatatggcctcaagtcctctagtctctcgggctctcattaatcaagaaatcatcccaaacaataatgatatgatatatcaataataataacagagactgagataaaatgtgcaagtaaaaactgagactgggtacatatagcatttagcaggcaattcaacaagtacgcgacctctgtgggtcccaacagtactatcacatagcctaagcatgatttctaacatgatttacagccaaattttatcaacacatagagagcatatagctaacaacaaattattcaactttacaatttctcgggatcgatcaaatcacaatcacctcggtgcacgcccacacgcccttcacctagcatgtgcatcacctccaaaataatcacatgataccaaaatctggggtttaataccctcaggaccaatttaaagctgttacttacctcaagccgtgaaattcttattctgcaatgtcctttcctcgtgaattggtctccaaacgcctcgaatctatccataaataattattttccgtcaaattaatttattggaattaattccacaagaaaatgctagttttccataaaaatccgaattttagctcaaacatcgcctgtggggcccacatctcggaactcgacaaaagttataaaatttgaaagcccattcaaccacgagtctacccataccaattttaccaaattctgacctcaactcgatcctcaaatctacaaatcttatttccaaatttctaagttccaatctccgatttacacctcaaaatcatgtaatctagtcggattattcgatgataattcaatactatggagtagaaatgatcacaatggacttacctcaagtttttccttgaaatatatcaaattttgcctctcctcaagctccaatttgtcaaaaatggcgaatgggacgaagtccttatttttataattctacccagacaacctcgattctgcctcgatcttggccttcgatcgaggtcctcaatcctaggcctcgatcatgggcctcgatcctggccctcgatcctagccctcgatcatgggcttcgatcatggcttcgatactgatcctcgatcatggccctcgacactggccttcgatcatgtcttcgacggtgaccctcgacactgggctcgatcatggcttcgatcgtggccctcgaccatgggctcgatcatggcttcgatcgtggccctcgaccctgggctcgatctgagctcacatatgggctcgatttctgagctcgattctgagagatttctgggctcgaatctggcagaagaaatttccaacataaggaaattgcagcagctgttgtagttcaatttttgatccgttaaccattcgaaattcacctgaggccctcgggacctcaacaaaatataccaacaagtcctaaaacattatacaaacttagtagaatcctcaaatcacctcaaacaatgctaaaaccatgaattacgccccaattcaagcctattgaactttgaaatttctaatttctacaaataacgctgaaacctatcaaatgatgtccgattgacctcaaattttgcacacaagtcattaatgacataacatacctattaaaattttcagaattggatttcgaccccgatatcaaaaagtcaacccctcactcaaactttccaaaaattcaactttcggcatttcaagtctaattcctctacggacctccaaaaattcctccggacacgctcctaagtctgaaatctccatacggagctattggaattatcaaaatctaaatccgaggtcatttacacataattctatatccggtcaacttttctaacttaaatgttttaattatgagactaagcgtctcatttcactccgaatttcctccggacccgaatcaactaacacggtaagtgttaaaatgactgtaaagaataaattgagtagtaaattagggaacagggctgtaatactgaaaacgaccggccgggtcgttacaggtgcggagttagaggatgtcggcagcggtcacaagtgcgatgggatttccgcacctgcgattgcgtagatgtgggcagggatcgaagaagcagaggctcgctgggtaagtgatgtccacagaagcatatttgtttccgaaaaaaatgatgctcaagtgtaagcccaagctccgcaggtgcggaaatgcctgggcagtggcaaaaacgagggttttcgatattttactcattttggacattttggagctcggtttgggcgactttggagaagaagttttccacacaacttggggtaagtgttcttgactcccttgtgattatatttcatgaannnnnnnnnnnnnnnnnnnnnnnnnnnnnnnnnnnnnnnnnnnnnnnnnnnnnnnnnnnnnnnnnnnnnnnnnnnnnnnnnnnnnnnnnnnnnnnnnnnnnnnnnnnnnnnnnnnnnnnnnnnnnnnnnnnnnnnnnnnnnnnnnnnnnnnnnnnnnnnnnnnnnnnnnnnnnnnnnnnnnnnnnnnnnnnnnnnnnnnnnnnnnnnnnnnnnnnnnnnnnnnnnnnnnnnnnnnnnnnnnnnnnnnnnnnnnnnnnnnnnnnnnnnnnnnnnnnnnnnnnnnnnnnnnnnnnnnnnnnnnnnnnnnnnnnnnnnnnnnnnnnnnnnnnnnnnnnnnnnnnnnnnnnnnnnnnnnnnnnnnnnnnnnnnnnnnnnnnnnnnnnnnnnnnnnnnnnnnnnnnnnnnnnnnnnnnnnnnnnnnnnnnnnnnnnnnnnnnnnnnnnnnnnnnnnnnnnnnnnnnnnnnnnnnnnnnnnnnnnnnnnnnnnnnnnnnnnnnnnnnnnnnnnnnnnnnnnnnnnnnnnnnnnnnnnnnnnnnnnnnnnnnnnnnnnnnnnnnnnnnnnnnnnnnnnnnnnnnnnnnnnnnnnnnnnnnnnnnnnnnnnnnnnnnnnnnnnnnnnnnnnnnnnnnnnnnnnnnnnnnnnnnnnnnnnnnnnnnnnnnnnnnnnnnnnnnnnnnnnnnnnnnnnnnnnnnnnnnnnnnnnnnnnnnnnnnnnnnnnnnnnnnnnnnnnnnnnnnnnnnnnnnnnnnnnnnnnnnnnnnnnnnnnnnnnnnnnnnnnnnnnnnnnnnnnnnnnnnnnnnnnnnnnnnnnnnnnnnnnnnnnnnnnnnnnnnnnnnnnnnnnnnnnnnnnnnnnnnnnnnnnnnnnnnnnnnnnnnnnnnnnnnnnnnnnttaatcttcatttttcgtgtatgattatcgaatttgcaagagaagtcgaaagaaatttcaataattttataaaaagaatttttgagttttgaatgccgattcggagtcatatttgagtgaaattagtatggttaaactcgtaattggatgggttgtcaaattttgtgagtttcatcggattcagaaatgtgggccccactgtcaatatttcgagcggatttaggaatagtttttctaaattgataaatttcaagcatttgagtgtattttgattaatttgcatgttgtttgatttgtttcgaatcatttggcatggaattgaggagatatgaaggcgttcagaggttgatacgatcagaatagaatttccggagtattgtttagcttgctcgacattggatttgtcttgttcgaggtaagtaatacttataaacttagttctaagggtatgaatcccctaatttggtgttatttaaattttttggaggtgacgcatacgataggtgacaagcgtgtggacgagaaccatagaaattgtaacttgaataaatcatgtgaagttgtaaaattaaataatcatgttattattcgtatattctccacgtgttaggaaattgagctgagactcgtattaaagatcatgattacgctacgtgccgatattttaggacccatagggtcatgttgctgttgaatttaattgttttaaaaatatatatttttttcatactcaatcatgttcattcattgtgaggatatttaggggattggggctgcccgcatgtagcaagccatgtcggctttatatatatatatatatatatatatatatatatatatatatatatatattatatatggaatggggttgcccgtctgcagcaggccttataggatttatcattatatggatcggggttacccgcctgtagcaagccatatcgactttatatcacgcttgggctgaaggagcccctccggagtctacaccccccatagtgagtgtaggcatgcaccgtatgaattgtgacttggtcaaattccatagaactgtgtagttgaataatctgttattttttgtatatttttcatgtagtagagaaattaaaccacaaattatgtttagattatgtgttggcactatagggacccacataggtcgtgtacatattgaactatctgcttaactgttgtttgtactcagtcacagtttacttgtttattttatttcagtctctattgttcattattgatgcatcatatcattgttgtttcggctgatttcatgattattgagagcccgagagactggagagatttataactaagtgaggccgagggcctgattgtgagatattatactatagcgcgtgagttgtccatgcagcatgtgagttatccgtgcggatccatatattatactatagcacgtgaattattcgtgcgggtctagatattatactatagcatgtgagttgtctgtgcatcacgtgagttatccgtgtggattattacgcttgggctgtaggagcccctccggaatctgtaccccccccccccccccccccctccgtgagtgcgggtacctactgagtgtgagtgctgaatgatgggtgaatggaatggctgagtgactgtggtcttgagaggatgcatttgatttctttctcattgcactatagctgtcatatacccatgttttggaaaatttctgaaagatattatctcttgtttcagtcaaacctgatacgaagttactgtttgggctctaaattgttcaacttgcaagcatgcctactttcttatgttggaaattactgtaattggacttagctgtgacgctcgtcactactttaagttctttatttagtattattacttgctgagttggttgtactcatactacaccatgcacctcgtgtgtagatccaggtacttcatgacacgacggttgctatttttcaaaactttatctattggaaactatcgaggtagctgcttgacattcgcaaaccttgactctctttccttttaggctttatactgtttatattttcaaatagcattttgtcagtcagacattgttatcatttaggtgctcatgtactcagtgacaccggattttgggaatgtatgctatgttaataatttgtgagcttttctatggaattcaaatattatgttttcaaatttaaaagaagttgtggtttattgaggtggtcggcttgcctagtattgagataggcaccatcatgacaggttaggattttggattgtgataagttggtatcagagcttaggttacataggtatcacaagttatgagcaggtttagtagagtcttggggatcggtatggagacatctgtacttatcttcgagaggatatcgaacccttaggaaactttcactttcttgtattctatcatgcgaacttattgattacggaaaactaaaattttgttattttattctctcacacgtggtgagaacacgtactaccgaatcgcacggtcagctactagttagggtcgtaagaggctggggccgtagtagaggcggtcccaaggtagaggtcgaggtgtcacttgtaccacagttggagcagcacctgtagcaccaccagttgctccatatcaagagcagattctagatgtagttgagacggcaggacccactcaggtaccagttgtgtccattgagattccaacatagagcactacaagcccagtcggttgaaactactcaagccccggtagtccccgttatgacagatgatgagcataggagacttgagagatttgggaggctttgacctccatcatttagcgtgctgagtaagaggatgctatggttttctagataagtgccagtagatgcttcgaacaatgggtattctagagaccagtggggtctcattcactacttttcagttttctggggctgccttcagatggtaggagtcttatgagaggcgcaggtcgatcggtgcagtaccacttacatggaaggagttctgtattctcttttttgagaagttcatgctgcagtcttatagggaggagctgtgcagacagtttgagcaagatggcatgtatgtgacctagtacgagatgaggttttctgagttggttcgtcacgcagtttggttggttcccattgataaagagaggattaggaggttcattgatggcctcgcgtattaactgcggttgcttatgactagggagaggatatctggtgccacttttgatgaggtggttgacattgctcgacagatagaggtagtccatagctaggagcatggtgacagggaggccaagaggccttgaggttcgggcggttttggtgggataccttctaggggacagtcctaccacagcaggggtcgcccttataggcccactcatacgacttgtccagctcatcgtggtgcatcagttagccacagttcttatagtgctcactcaggccagtcttcattcagtgcactaccagcgtagagttcttatcatgcctcgtctgctcaagctttgacaactaattcctcaggttatcatgggaaaaagtttcgccagaggagggtttgtttcgagtgtggagaatttggtcatttcaagagagattgtcctagggtgttgagtggggctccacaattgagttctcggccaacggtactagcaccagtagttacaccacccacccacctagctcggggtggggatcaaccagttagaggtcgccgaagagggtgaagccgatcaggtggtggtcaggcctgattctatgcttttcctgccaggccaaatgtcgttttctcagatgcagtgatcacatgtattgtgtcagtgtgcgacaaggaggcatctatattatttgaccctggttctacttattcgtaagtatcatcgtactttactcattatctggatatgccccgtgagtccttagtttcacctgtttgtgtatctacgtcggtgggagatactattatggtggaccgtgtggttgattttgatgcaatctcaggtatggattagtggtccccatgtcatgctattctggactggcacacaaaaactgcgacattgacaatgtcggggttgccaaaggtcgaatagagacgttctctagattatgttcccatcagggtaatttcttatttgaagacccaacgtatggtggggaaggggtgtttgtcatatttagattttgttagaaatgttgatacatatacccctattattgattcagtaccagtagtgcgagactttccggatgtatttcctgcagacctattgggtatgccacccgataaggatattgatttcggtattgacttggtgtcgggcacacaacccatatctattcctccgtatcatggcaccagttgaattgaaagagtcaaaagaggaacttcaagaacttcctgataaggggtttattaggcctagtgtatcgccttggggtgcactgattctgtttgtgaaaaagaaagacggtactatgtagatgtgcatcgattataggcaactaaacaaagttacaatcaagaataagtatcctttgccgcgtattgatgatttatttgaccagctatagggagcgaatgtattctccaaaattgatttgagaaccgggtatcactagttgaaaaatcaggattcggatattctaaagacgacattcatgactcgttatggtcactatcaatttctcgtaatgtcgtttggactgaccaacgccccagcaacatttatgcacttgatgaatagtgtattccagccatatcttaatttattcgtcgtaatttttattgatgatatcctggtgtactcacgtagccaggaggagaatgcacaacacttcggtattttattacaaaggcttagagaggagagactgtatgccaaattctctaagtgtgagttctggcttatttcggtggcattcttgggacacaaagtgtctagtgaagggattaaggtggatccgaagatgatagaggcagttcagagttggcccaggccatcttcaactactgagattcggagttttctcggcttgtccggttattatcgtcattttgtggaggatttctagtttattgcatcacctatgactaaattgacccataaaggtgctccgtttagatggtcgtatgaatgtgaagagagatttcagaagctcaatatagctttgactacatccctagtattggtattgcctacaggttcagggtcttatactgtgtattgtgatgcatcgcgtattggtctcagcgcagtgttgatgcaagatagtagggtgattgcctatgcatccaggcaattaaaggcacatgagaagaatgatctggtccatgaccttgagttagcagctattgttcatgccttgatgatttggcgacattatttgtacggtgtccattgtgaggtttataccgatcaccggagtctacaacatccgtttaaacagaaggatcttaatttgcggcagcggaggtggttggatttgcataaggattatgatatcaccattctctatcatcccggaaaggccaatgtggtggcatatgccttgagtcgtaaggcggaaagtttgggcagcttagcattcttaccggtaggagagaggcctttagccttaggtgtccaggccttggccaaccagtttgtttgattgaatgtttttgagccgagtcgagttttggcttgtgtggtttctcagtcttttctttatgaaggtatcagagaacgtcagtatgatgacccacatctgcttgcccttaaggacacggttcagcacggtgatcccaaggaagtcactattagggatgatggtgtattacagatgcaggacaggctatatatgcctaatgtagatgatttgcgtgagctgattctccaggaggctcacagttctcggtactccattcatccaggtgccgcgaagatgtatcaggatttgaggcagcactattggtgaaggcgaatgaagaaagatatagttagatttgtaggtcggtgtttaaattgtcaacaggtgaagtacgagcatcagagaccaggcagattgcttcagagacttgaaattccggagtggaagtgggagcgtattaacatggacttcgtagttgggctcccacggactttgagaaagtttgatgttgtttgggtgattgtagaccggttgaccaagtccacgtattttattccagttggtactacctattcttcagagcggttggctgagatttatatccgcaagattgttcgcctacacggtgtgccggtgaccatcatttggaattggggcacgcagtttacatcacagttttggagggcagtacagcgagaattaggtacacatgttcaactaagtacatcatttcaccctcagatggacgggcagtatgagagaactattttgatattggaagatatgctatgcgcttgtattatagattttggaggttcttgggattagtttctgccgcttgcagagtttgcttacaataatagctacaaatcaagcattcagatgactctgtatgaggatttatatgggagacggtgtcggtatccggtgggttggttttagctgggtgagactaggctattgggtattgatttggtttaggatgctttgaagaaggttaaattgattcaggagcggcttcgcatggcgcattctagacagaagagttatgttgaccggaaggtccgtgatgttgcttacatggttggggataaggttcttctcaagatttcgcccatgaagggtgtgttaaggtttgagaagaagggcaagttgagccctcggtatattaggccgcttgaggtgcttaagaagattggaaatgtggcttattaacttgcattgccgcccagtctatcgagtgttcatccagtgtttcatgtatctacgctccagaaatatgtcagggatccgtctcatgttttggattttagcatagtgtagttggatggtaatttgacttataacgtggagccggtggccattatagaccggtaggtttgaaagttgagatcaaagaacataacttcggtgaaagtgcagtggggtcagccaatcggagaagctactcgagagattgagcaagagatgcagagcaaatatccatacctatttgagactccaggtataattctaaatttgtttaagagggggagaatgtaacgactctgccgatcgtttcgagtattacaaccatgtctccccaattacttctaaaattgtgatttacgattgttatttgactttccaaggtaattggttcgggcccggtgaggttttagaataatttggaacacttagttccaaggtttagaacttaagttgaaaaggttgaccggatgttgacttatgtgtaacgaccccgaaaattatttgctaaggaaattatgattttgtggtgccgaactaggctgggacttttggtgttgaacaatgagcggtgagtgaagcaggttaggccaagttttgagatcaggtttgcagcgaattatgcgtccgcagaccagttttgcggtacattatgcgaccgcataacaggtatgtgggacgcataatgaccgcagactaaagcagtggcccagttccggagggcctttttgcaacccattatatgggccgcagaagcattatacgaccgcagagtgtgtttcggagctttatttttctagtataatatacccggccccattcttataaaacactattatgggtcattttgaagggtttcatctgatattttagagagatgagagagaatcttagagagagaaagtaaagacctagccatttgtccatcaattcttgttcaaggtttgaagatttcacaaggatcttgctaggacttccaagaggtaagaatttctaaccctagtcttcaaattcgagtttgggtaaatatgggtgattaagagtatgattcttgagtgtaagagtattatttatacatacacgtaccaataaggtttgtggaaagatttttgagttcaaatgggtaaagattgggttgaaaatggtaaaaatctttaaagactttaattgaaggtttgagggtcgagttaatgttggaattttgtgaaatttatatggttggactcgtggttggattggcgttcatagtttgtaatttttgtggttccgaggcatggtccccacgggagaattttgaatgcaattttggattttgttggaaaattaatattttcatatggaattaattcctataatttgaattgattgaatcaaattaattgtgactagattcgaggcgttcagaggccgattcgtgaggcaaaagcttattggaataaagaattgctcggatttaggtaagtaacagttttaaatttggcctgagggtatgaaaccccggattatgtgttatgtgatcggttgtgaggtgacgcacatgctaggtgacgggcgtgtgggcgtgcaccgtaggaattgtgactcactcaaattctatagaactgtgtagttgaataatatgttgttatctgtacattcttcatgtagtagagaaattgaaccacgaatcatgtttagattatgtgttggcaatgtagggacccacaaatatcgtgtacatgttgaactatcttcttaattgttgtttgtactgagtcacagtttacttgtttattttatttcagtctttattattcattattgatgcatcatatcattgttgtttgggctgatttcatgactattgagagcttgagagactggagagatttatgactgagtgaagccgagggactgattgtgagatattatactatagcacgtgagttgtccgtgtgaatccatatagtatactgtagcacatgagattttcatgcgggtctagatattatactatagcacatgagttgtctgtgcggattcagatatttatactatagcatgtgagttgtccatgcagcacgtgagttgtccgtgcagattatagcgcttgggatataggagcccctccggagtctgtacacacccctagtgagcgcaggtacctactgagtgcgagtgctgagtgctgagtgaatggaatggctgattgattgtcgtcgtgagaggatgcatttgatttcattctcattgcactacagttgtcatatatccctgttttggaaaatttctgaaatatattatctcttgtttcagtcaaacctgatatgaaattaatgtttgggccctaaattattgaacttgcaagcatgcctactttcttatgttggaaattactataattagagctgtaaaactcgtcactattttcagttctttatttagtattgtttcttgttgagttggttatactcatactacactctacacctcgtgtgcagattcaggtactttcggacacggcgattactagtttttcgaagttttatctgttggagactatcgaggtagctgcttaacgtccacagaccttgactcgctttccttttatgttttcactaatctatattttcaagtagtgttttatcagtcagacattgttatcatttagatgcttatgcactcagtggcaccgggttttgagaatgtatgctatgttagtaatttgtgagattttctatggaattcaaatattatattttcaaacttaaaagaagttgtggtttattgaggttgttggcttgcctagtattgagataggcgccatcacgacatgttaggattttgggtcatgacacttggcacaagaaattatttaaatatactcacttcatctcaattgtgaacttatttcctttgtactccgtgccaaaaagaatgatcacttttcatatttggaaataattaacttttttgcaatgatttataatgacgaaataaatatgcctcagtttacaccgcaagttcaaaaatcttctcttttttcttaaactccgtgcacagtcaaatgagttcccttaaattaaaacggaaggattaggatttaatgtccatcttacttttctgtttcccttgtcttttcttatttgaagaactttgagagagagagaagaaagagatgggccattgatatggagagaggaagtatgaagagctaataagtttggaattccgaatttgttaaaatgtggttaatttcaagaaatatttcataattattggttaagggtggcatgtgtgccggttaggatcgggaccggcccaggaccgcaagcccatatgggcggtgggcctaaacggtcctaaccggataggaccgggaccgtggggaggtgggctgggtagtaggccggtcctataggggaggcccgcgagaccgggaccggctgagaagtgggctggttcaagcggtcctaaacggtcctaaacgggcccaacggataattttttaaaaataaaattgaccgtttgtccatttaaaaactagttgtttggtctgccaaaatagccatttaaccacccaaactttgttttaaccctaaactttttataattatactttttccctattttcaactataaataccccttcattctttcatttttctcacaaaatcatcaatctctctctaatatcattctataattgcttacttaattgttacattttgtgcaaaattataaagttagtgaattgaagtcttcaagtcttcaacgataattaattttcaacaagttgttcgtcaattcggtaaacttgatccaactcttaatttttaatattatagttttgtttgttttatttactttgcttgattaattaagatggcttattccttaaaaaaaatatttagtaaaaataagannnnnnnnnnnnnnnnnnnnnnnnnnnnnnnnnnnnnnnnnnnnnnnnnnnnnnnnnnnnnnnnnnnnnnnnnnnnnnnnnnnnnnnnnnnnnnnnnnnnnnnnnnnnnnnnnnnnnnnnnnnnnnnnnnnnnnnnnnnnnnnnnnnnnnnnnnnnnnnnnnnnnnnnnnnnnnnnnnnnnnnnnnnnnnnnnnnnnnnnnnnnnnnnnnnnnnnnnnnnnnnnnnnnnnnnnnnnnnnnnnnnnnnnnnnnnnnnnnnnnnnnnnnnnnnnnnnnnnnnnnnnnnnnnnnnnnnnnnnnnnnnnnnnnnnnnnnnnnnnnnnnnnnnnnnnnnnnnnnnnnnnnnnnnnnnnnnnnnnnnnnnnnnnnnnnnnnnnnnnnnnnnnnnnnnnnnnnnnnnnnnnnnnnnnnnnnnnnnnnnnnnnnnnnnnnnnnnnnnnnnnnnnnnnnnnnnnnnnnnnnnnnnnnnnnnnnnnnnnnnnnnnnnnnnnnnnnnnnnnnnnnnnnnnnnnnnnnnnnnnnnnnnnnnnnnnnnnnnnnnnnnnnnnnnnnnnnnnnnnnnnnnnnnnnnnnnnnnnnnnnnnnnnnnnnnnnnnnnnnnnnnnnnnnnnnnnnnnnnnnnnnnnnnnnnnnnnnnnnnnnnnnnnnnnnnnnnnnnnnnnnnnnnnnnnnnnnnnnnnnnnnnnnnnnnnnnnnnnnnnnnnnnnnnnnnnnnnnnnnnnnnnnnnnnnnnnnnnnnnnnnnnnnnnnnnnnnnnnnnnnnnnnnnnnnnnnnnnnnnnnnnnnnnnnnnnnnnnnnnnnnnnnnnnnnnnnnnnnnnnnnnnnnnnnnnnnnccccgtctgaccctcctgttactgcccctacgttttctagacaaccttctaaaggggcaaaaacatctcttgtttggccattttttactcaactaagagaaaaaaatagggctaagtgtaaaacttgtggcaaagagttagtttttaaatatgttggaagtcgggaggggggggggagggagtttgactagacacatattgctacaccctcaagataaagctagatattttcgtatgaaagctttggccgaggggacaagtgcatctactcaggctgaccttagtaccgggtcaaatcaattttaaccgggaattaacactgataccggtggtattttatattatgatccaaaaaaagatcaggaagaattggaaaaaatggttattgttatgtgcttagcccatagtttttcttctaaccctcactttgtgcattatattagaaaagtttataatcctacttataaaggttttcctcgcacaaccgtaaagagcgatatttataaatataaacatgaatatgaataatatttgcgctatttatttactcatataaattgtcgtgttgctattataactaatatcggtagaagtggtaatgattgtgattaccttactgttaccagtcattggattgatgaggattggataatgcaaaagcacattattgcttatagaataattaattcacgtcacacaggacagtttatgtcacgaacccaaattccctccgtaggatgtcgtgatggcacctagtctctaagactaggtaagcctatcaatgcggaataataataaatatctgaaannnnnnnnnnnnnnnnnnnnnnnnnnnnnnnnnnnnnnnnnnnnnnnnnnnnnnnnnnnnnnnnnnnnnnnnnnnnnnnnnnnnnnnnnnnnnnnnnnnnnnnnnnnnnnnnnnnnnnnnnnnnnnnnnnnnnnnnnnnnnnnnnnnnnnnnnnnnnnnnnnnnnnnnnnnnnnnnnnnnnnnnnnnnnnnnnnnnnnnnnnnnnnnnnnnnnnnnnnnnnnnnnnnnnnnnnnnnnnnnnnnnnnnnnnnnnnnnnnnnnnnnnnnnnnnnnnnnnnnnnnnnnnnnnnnnnnnnnnnnnnnnnnnnnnnnnnnnnnnnnnnnnnnnnnnnnnnnnnnnnnnnnnnnnnnnnnnnnnnnnnnnnnnnnnnnnnnnnnnnnnnnnnnnnnnnnnnnnnnnnnnnnnnnnnnnnnnnnnnnnnnnnnnnnnnnnnnnnnnnnnnnnnnnnnnnnnnnnnnnnnnnnnnnnnnnnnnnnnnnnnnnnnnnnnnnnnnnnnnnnnnnnnnnnnnnnnnnnnnnnnnnnnnnnnnnnnnnnnnnnnnnnnnnnnnnnnnnnnnnnnnnnnnnnnnnnnnnnnnnnnnnnnnnnnnnnnnnnnnnnnnnnnnnnnnnnnnnnnnnnnnnnnnnnnnnnnnnnnnnnnnnnnnnnnnnnnnnnnnnnnnnnnnnnnnnnnnnnnnnnnnnnnnnnnnnnnnnnnnnnnnnnnnnnnnnnnnnnnnnnnnnnnnnnnnnnnnnnnnnnnnnnnnnnnnnnnnnnnnnnnnnnnnnnnnnnnnnnnnnnnnnnnnnnnnnnnnnnnnnnnnnnnnnnnnnnnnnnnnnnnnnnnnnnnnnnnnnnnnnnnnnnnnnnnnnnnnnnnnnnnnnnnnnnnnnnnnnnnnnnnnnnnnnnnnnnnnnnnnnnnnnnnnnnnnnnnnnnnnnnnnnnnnnnnnnnnnnnnnnnnnnnnnnnnnnnnnnnnnnnnnnnnnnnnnnnnnnnnnnnnnnnnnnnnnnnnnnnnnnnnnnnnnnnnnnnnnnnnnnnnnnnnnnnnnnnnnnnnnnnnnnnnnnnnnnnnnnnnnnnnnnnnnnnnnnnnnnnnnnnnnnnnnnnnnnnnnnnnnnnnnnnnnnnnnnnnnnnnnnnnnnnnnnnnnnnnnnnnnnnnnnnnnnnnnnnnnnnnnnnnnnnnnnnnnnnnnnnnnnnnnnnnnnnnnnnnnnnnnnnnnnnnnnnnnnnnnnnnnnnnnnnnnnnnnnnnnnnnnnnnnnnnnnnnnnnnnnnnnnnnnnnnnnnnnnnnnnnnnnnnnnnnnnnnnnnnnnnnnnnnnnnnnnnnnnnnnnnnnnnnnnnnnnnnnnnnnnnnnnnnnnnnnnnnnnnnnnnnnnnnnnnnnnnnnnnnnnnnnnnnnnnnnnnnnnnnnnnnnnnnnnnnnnnnnnnnnnnnnnnnnnnnnnnnnnnnnnnnnnnnnnnnnnnnnnnnnnnnnnnnnnnnnnnnnnnnnnnnnnnnnnnnnnnnnnnnnnnnnnnnnnnnnnnnnnnnnnnnnnnnnnnnnnnnnnnnnnnnnnnnnnnnnnnnnnnnnnnnnnnnnnnnnnnnnnnnnnnnnnnnnnnnnnnnnnnnnnnnnnnnnnnnnnnnnnnnnnnnnnnnnnnnnnnnnnnnnnnnnnnnnnnnnnnnnnnnnnnnnnnnnnnnnnnnnnnnnnnnnnnnnnnnnnnnnnnnnnnnnnnnnnnnnnnnnnnnnnnnnnnnnnnnnnnnnnnnnnnnnnnnnnnnnnnnnnnnnnnnnnnnnnnnnnnnnnnnnnnnnnnnnnnnnnnnnnnnnnnnnnnnnnnnnnnnnnnnnnnnnnnnnnnnnnnnnnnnnnnnnnnnnnnnnnnnnncaaacaggtaaaacaattagtaagaaaagatcaaacaaatttgaagtatatatctcacatcaatgataaagaatataacaagaaaaaaaaatttaataaatgcgcaacagtgatctacacaatttaaaaatataatctttcacaatttaacccgcgtacacactcgtcacctcgtgcacacgactttcaacacatttcaataatcacatcaataccaatcctagggaaaattttccccacacaaggttaggcaagtcacttacctcgacttgctccaatttaaccaagtattatgctttttcctcgattttccgactctgatcgactcgtatctagtcataattaattcgatacagtcaacaaaaattatagtaatcaatttcataagaaaatattacattttcattaaaatccgaaattagctcaaaatttgcccgtggggcccacatctcggaatccggcgaaacttataaaatccgacaacccattcaattacgagtccacccataccaattttaccaaaatccgataacaactcgacctccaaatcttaaattttcgtttttggaagattttgcaaaaatcttgatttcttccatttaaatccgaaataaatgatgaatatgaccatggatttatgaaatataatcacatttggatataggacacttacccaagttgaagtcttgaagaaatcctcaaaatcgcccaagaaccgtgctccaaaactccaaaacgaaatgaaggaaatgaccatttttggtccttaagtttctgccccaaaaacactattccggtcgctaaaagtccaatcccgtcgctaaaagtgtcacatctggtcgctaaaggtgcacaccaggactatttacaccacagttttatttcactaaaaaggctctaactccatcatacgaactcggaattcgacgattcttgttcctatgagtcacaaataaaactacgaacccattcgttcaatcgaaactcaattcggagctcatttgctcaatgtgataccaatttcgctcgttaaacaattaactcatatttcgcgcttaaaactcaatcgcgacttgatgaaattagaccaaactttccagatcactcctataattcattatcaaaatgtcgaaagtctcgaaatcgaatttcgatctctagaactaaaaatggacttttggatcattacatgcttatgttgaaaacatcaaactcttcctcgacagcctgtagtgtatcaatcataacttcttgtactcaactccaactgccaaacggtttaaagttctgcaaactagatacaaagtactacaactttcatgttttgctcatcgcccaactccttatagattgcgagatataagctcccaaagtcagccctgtgcagcagaaatttctggcgatgcacactgctgtagcaaaaatctgcagtacagcttcagtcaatcgatcataacattttgtataaatgtctgaatgataaatggtttatcattctggaaactagaatcaaagggctacaactttcatgttttgaaaatgttcagattccttatagatttcgagatataagcttccaaagtcagctctgcgattgcaccggttgctgtccaaaaacagcttctgcagcagaaaaattccagcagctcctttttgtccgaaattcattccgttaaccttccgaaatccacccgaggccctcggtaccttaaccaaatataccaacatgtcccaaaatacaatatgaacttagttgaggcttcaaaccatgccaaacaacgccgaaattacgaatcgcgcatcgaatcgaattatgagttttcaaatcttccaacttctatattttgcgccgaaacatatcaaatcaattccgattgacctcaaattttgcacacaagtcataaatgacataatggatttataaaaattttcagaatcggatttcgaccccgatatcaaaaagtcaacccctcggtcaaacttcccaaaaattcaactttcggcatttcaagcctaattccactacggacttccaaataaaattccgatcacgctcctaagtccaaaatcaccatacggagctgttggaatcatcaaaattctattccggggtcgtttgcacataatttgacatccggtcactatttgaacttaaacttttaatttttcatcaaaattccatatctcgggctagggacctcggaatttgattccgggcatacgcctaagtcccaaatcacgatacggacctaccaaactgtcaaaacactgatccgagtccgtttgctcaaaatgttgaccaaagtcaactcagttgagttttaaagctctaattcacattttaatccatttttcacctgaaaacttttccgaaaattttacggactgcacacgcaagtcgagtaatgataaatagtgcttagatcacataattaattattaaatttaaagatgacattttgggtcatcacattctccacctctaaaacaaacgttcgtcctcgaacggagttagaaaaagtacctgagctggtgaataagtgtggataacagctgcatatcatgctcggtctcccaagtcgcctcctcgaccggatgacccctccactgaaccttcacggaagcaatgttctttgacctcagctttcgaacctgcctatctaaaatagccactggttcctcaacataagatagatccttgtccaactgaaccgaactgaagtctaacacatgagacggatcgccgtgatatttccgaagcatagaaacatggaataccggatgaaccgcagagagactaggtggtagtgcaagtctgtaagccacctctccaactctctcaagaatctcaaaaggcccaatatacctagggctcaacttgcccttcttcccgaacctcatcacacccttcataggcgaaacccggagcaatacccgctcaccaaccatgaatgcaacatcacgaaccttccgatccgcataactcttctgtctagattgggctgtacgaagtcgatcctgaatcaacttaaccttttccaaggcatcctgaaccaagtctgtacccaatagtctagcctcgcccggttcgaaccaacccactggagaccggcaccgcctaccatacaaggcctcatacggagccatctgaatgcttgactggtaactgttgttgtaagcaaactccgcaagtggtaagaactgatcccaagcacccccaaaatctatcacacacgcacgaagcatatcctccagtatctgaatagtgcgttcggactgcccgtccgtctgagggtgaaatgttgtactcaactctaccgagtacccaactctcatgtactgccctccaaaaccgtgaggtaaactgtgtaccccggtcagagatgatagataccggtacaccgtgaagtctgacaatctcgcgaatatatacctgagccagctgctctgaagagtaagtagtaatcacaggaatgaaatgagctgacttggtcaatctatccacaatcacccaaactgcatcgaacttcctccgagtccgtgggagcccaacaacgaaatccatagtgatccgctcccatttccattctggaatttccaacttctgaagcaatccacccggtcgttgatgctcatatttcacctgtgacaatttaggcaccgagctacatattccactatgtctttcttcatccgcctccaccaatagtgttgtctcaagtcttgctacatcttcgcagcacccggatgtatggagtaccgcaaactgtgagcctcctggagaatcaattcacgaaaaccatctacattaggcacacatagcctgccctgcatccgtaatacatcttcatctccaatagtgacttccttggcatcaccgtgctgaactgtatccttaaggacaagcagatgggggtcatcatactgacgttccctgatacgatcataaagagaagactgagaaaccacacaagccaaaactcgactcggctcgaaacatccaatctgacaaactggttggccaaggcctgaacatccaaggccaaaggcctctctgctaccggtaaatatgctaagctgcccaaactctccgccttacgactcaaggcatcggccactacattggccttcccaggatgatagagaatggtgatatcataatccttaagcaactccaaccatctctgccgcaaattaagatccttctgtttaaacagatgttgtagacttcggtgatcggtgtagacctcacaatggacaccgtacaaataatgccgccaaattttcaaggcatgaacaatagctgctaactcaaggtcatggaccgataattcttctcatgtacctttaactgtctggacgcgtaggcaatcaccctaccgtcttgcatcaacatcgcgccgagaccaatacgcgacgcgtcacaatacacagtataagaccttgaatatgtaagtaataccaacgcttgtgtcggagtcaaagtgatcttgagcttctgaaagcttaactcacactcgtctgaccctgtaaatggggcaccctcttggatcaatttggtcttaatagttgttcataatcaattacagaatcgtcatttaacctcatgttaacaaaaatctcgttgcaaaccttcacaatactgataactagatgcgaggcatgaagacttcataattatttacccgaattaacgagtcacatttaacgccacctaggcgggcacctacctcgtaggttaaaaattaataattacaacacgaatttgacaactatgcacagagaatttcatataagaattttcaaataagcctaacaggcatgactccctattagtactatagtacaaatttaatttcacaagggagaacttaaacacaagaattttcctcacaaggatctcgtccttatataacttccaccgcagctcgtagcccggtttaaacatatcaatttatataaaaatgtgaggatctcgtcctcagttctgaatcacaagtaatatgcacatcgtgccaattgaaaatttccattttctccttttaaataatttcggttacaccaaatcacaacacataatgaaccccacaccggtagggcatataattcacaatttgcaattaattattcggaatttacatcaaaatttaccgaaatgagtaacagaaagccacatttagcctcgcagctcttattagtgaccaacacgaaatgataggcgtagttatctccataaaatctcccaacaggggtaaacacataagtagattatagaattatgaagctcactcataagtggagcacaataggaagactcgtttcgatattgagaaccgaatcaacttaaggaaattattcctttatattaaatcgaggtcgtacctgtaacgacaccatctgatgtagcgacctccgccataccgtaaaacaaatatatcaacggctgggtctccacctctaggacgccttttacccgtctgtcctccacccctaactggtcgtgtgggtggtgtagtaactgcaatggggcacgtagcctgagtgctttgatgaaataagtctctcccaagtttgggaatttttctcatgatgtgcctagtatcaccgtattcataacaacccttttgcgggttaggctgctcatattgagtctgtgccagataactggaataaccattgtaggaactcatgtcggtggtgcattaaaagaacttactggagcaccccgagtaatccgatgtgcagactgggctggacgactgcctgagccaagtgggcggtgttgcattggctggtctgccctcttcataggcttaccacgaacactggtggagaattatctctcccaaggcaaatttcttcttttgttatgctgactcaacactgttgagctgacccatttcttaacatactctttgattcttctttggggtaacccttacccctatttatacacaacgatcacaaaagtagagctccatacagacaaatcttggcacgaaccacatagtccagaatctcgtcaacaactgtacttactccgaagcaccccaaaatccgcaacagtgacgtccacgctgagtagaccttctacaaatttagagttgtttctataactcctttggtattgaagtataggattattaaggaggcggacataccgcaagtcccaaccttatcctctacaaaatctcaggtcttaaacatgtgtaaattttagggaacctttcagtaccacatatatacatttcaggccaaaactgatataatacatgaccccgcaatccacccattggtagtggactcccccactcggcgcgaagtcataggtcacaacgtccgatgatccacaataataaccttcacagcttgtataaatcaaccagacgccaacgtccgttgcacccccacatgattcactaggtgatctctcaatacgcccacatcttcagtcggaaccacacgttgaggcaatgtttgagcatctctggctccctcgtagtccatctgcggcatcacgaaccgtcgacgcacaactgataccgagtgcgcaatgtcatacacgagtggatacaaaggaatataagatatatgtttcaagctaaatcaatgccgcacgataaggagtcaaagaagtgaatatttcctaacagttccatagcctctcgaagataagtacagacgtctccgtaccgatccgcaagactctactaaacctgcttgtgactcataacacctatgaacctagtgctctgataccaacttgtcacgaccccaaattccctccgtaggatgtcgtgatggcacctagtctctaagactaggtaagcctatcaatgcggaataataataaatatctgaaataaataaactacaattcaaacaatttcaactcccaaaacccggtagaaataagtcacaagcttctaagaatttattctcaatgtctctatatgtcaaggtctaaataaaatataaggaagcaacataaaatgatagaaggggactccggagtctgcggacgctggcagatatacctcgaagtctccgtgcgcaggtaactcactgacgtctaggctggtaaaatgtacctggatctgcacaaaaagatgtgcagaagcgtagtatgagtacaccacagcggtacccagtaagtgccaagcctaacctcggtagagtagtgacgaggtcaggtgaggccctactggaatataataatggcatggtaaaatgtttatcaatgtagtaaaataaaatgacattgaaaatgaatcaaatagtatgtcacatttaatgacaccaaataattgcaaataatatctcgtggaaatcaaaacagaatttccttcaactttatgaaaatcacaacaataatcaaaggcaactacggccataaatcaatatcaacaagggcactcccgaggtaccgcctcgtagtcccaaatcataaataaattcacaatatctcatttccttatatcaccgcgggagccttcacaatttatttaaagaaaatattttttcccgaaatagcatcccgcgttttagccacccttatcacaccgcatgacttctagtagttccccctactagccacgcgtatcaagccacccttatctcaccgcatgcgtttcaacacccagaccttataccaccgcatgcgtatcaatatcacaatatatcacaatttgcacctcaagtgctcaaataatttaacttgccaaaataattcaacaacaatatttttccacaataaagagctcacggctcatgccaaaataaatcatcaataatagtttgccaaaataaatcatcaataatagacaataaagagctcacggctcatgtcaaaataattcatcaataatatttttccacaataaagagctcacggctccctcacaatgagtataaaaatattcaggagtaaataatttaggaaaataatatttcaaaatctttactacgttgcttcaatatcaagtttaaaaatgtcaaatacttcatattaataatatttaatttaaagaaaatcaaccttcaaataatgcacagaataaaagaaaccaagtttcaactaaacaggtaaaacaattagtaagaaaagatcaaacaaatttgaagtatatatctcagatcaatgatgaagaatataacaagataaaataatttaataaatgcgcaacagtgatctacacaatttaaaaatataatctttcgcaatttagcccgtgtacacactcgtcacctcgtgcacacgactttcaacacatttcaataatcacatcaataccaatcctaggggaaatttcccccacacaaggttagacaagtcacttacctcgacttgctccaatttaaccaagtattatgctttttcctcgaattttccgactccgatcgactcgtatctagtcataattaattcgatacagtcaacaaaaattatagtaattaatttcataagaaaatattatattttcattaaaatccgaaattagctcaaaatttgcccgtggggcccacatcttggaatccggcgaaacttagaaaatccgacaacccattcaattacgaatccactcataccaattttaccaaaatccgataacaactcgacctccaaatcttaaatttttgtttttggaagattttgcaaaaatcttgatttcttccatttaaatccgaaataaatgatgaatatgaccatggatttatgaaatataatcacatttggatataggacacttacccaagttgaagtcttgaagaaatcctcaaaatcgcccaagaaccgtgctccaaaactccaaaacgaaatgaaggaaatgaccatttttggtccttaagtttctgccccaaaaacactattccggtcgctaaaagtccaatcccgtcgctaaaagtgtcacatctggtcgctaaaggtgcacaccaggactatttacaccagcagttttatttcactaaaaaggctctaactccatcatacgaactcggaattcgacgattcttgttcctatgagtcacaaataaaactacgaacccattcgttcaatcgaaactcaattcggagctcatttgctcaatgtgataccaatttcgctcgttaaacaattaactcatatttcgcgcttaaaactcaatcgcgacttgatgaaattagaccaaactttccagatcactcctataattcattatcaaaatgtcgaaagtctcgaaatcgaatttcgatctctagaactaaaaatggacttttggatcattacatgcttatgttgaaaacatcaaactcttcctcgacagcctgtagtgtatcaatcataacttcttgtactcaactccaactgccaaacggtttaaagttctgcaaactagatacaaagtactacaactttcatgttttgctcatcgcccaactccttatagattgcgagatataagctcccaaagtcagccctgtgcagcagaaatttctggcgatgcacactgctgtagcaaaaatctgcagtacagcttcagtcaatcgatcataacattttgtataaatgtctgaatgataaatggtttatcattctggaaactagaatcaaagggctacaactttcatgttttgaaaatgttcagattccttatagatttcgagatataagcttccaaagtcagctctgcgattgcaccggttgctgtccaaaaacagcttctgcagcagaaaaattccagcagtcctttttgtccgaaattcattccgttaaccttccgaaatccacccgaggccctcggtaccttaaccaaatataccaacatgtcccaaaatacaatatgaacttagttgaggcttcaaaccatgccaaacaacgccgaaattacgaatcgcgcatcgaatcgaattatgagttttcaaatcttccaacttctatattttgcgccgaaacatatcaaatcaattccgattgacctcaaattttgcacacaagtcataaatgacataatggatttataaaattttcagaatcggatttcgaccccgatatcaaaaagtcaacccctcggtcaaacttcccaaaaattcaactttcggcatttcaagcctaattctactacggacttccaaataaaattccgatcacgctcctaagtccaaaatcaccatacggagctgttggaatcatcaaaattctattccggggtcgtttgcacataatttgacatccggtcactatttgaacttaaacttttaatttttcatcaaaatccatatctcgggctagggacctcggaatttgattccgggcatacgcctaagtcccaaatcacgatacggacctaccaaaactgtcaaaacactgatccgagtctgtttgctcaaaatgttgaccaaagtcaactcagttgagttttaaagctctaattcacattttaatccatttttcacctgaaaacttttccgaaaattttttacggactgcacacgcaagtcgagtaatgataaatagtgcttagatcttacataattaattattaaatttaaagatgacattttgggtcatcacattctccacctctaaaacaaacgttcgtcctcgaacggagttagaaaaagtacctgagctggtgaataagtgtggataacagctgcgcatatcatgctcggtctcccaagtcgcctcctcgaccggatgacccctccactgaaccttcacggaagcaatgttctttgacctcagctttcgaacctgcctatctaaaatagccactggttcctcaacataagatagatccttgtccaactgaaccgaactgaagtctaacacatgagacggatcgccgtgatatttccgaagcatagaaacatggaataccggatgaaccgcagagagactaggtggtagtgcaagtctgtaagccacctctccaactctctcaagaatctcaaaaggcccaatatacctagggctcaacttgcccttcttcccgaacctcatcacacccttcataggcgaaacccggagcaatacccgctcaccaaccatgaatgcaacatcacgaaccttccgatccgcataactcttctgtctagattgggctgtacgaagtcgatcctgaatcaacttaaccttttccaaggcatcctgaaccaagtctgtacccaatagtctagcctcgcccggttcgaaccaacccactggagaccggcaccgcctaccatacaaggcctcatacggagccatctgaatgcttgactggtaactgttgttgtaagcaaactccgcaagtggtaagaactgatcccaagcacccccaaaatctatcacacacgcacgaagcatatcctccagtatctgaatagtgcgttcggactgcccgtccgtctgagggtgaaatgttgtactcaactccaccgagtacccaactctctgtactgccctccaaaaccgtgaggtaaactgtgtaccccggtcagagatgatagataccggtacaccgtgaagtctgacaatctcgcgaatatatacctgagccagctgctctgaagagtaagtagtaatcacaggaatgaaatgagctgacttggtcaatctatccacaatcacccaaactgcatcgaacttcctctgagtccgtgggagcccaacaacgaaatccatagtgatccgctcccatttccattctggaatttctaacttctgaagcaatccacccggtcgttgatgctcatatttcacctgttgacaatttaggcaccgagctacatattccactatgtctttcttcatccgcctccaccaatagtgttgtctcaagtcctgatacatctttgcagcacccggatgaatggagtaccgcgaactgtgagcctcctggagaatcaactcacgcaaaccatctacattaggcacacatagcctgccctgcatccgtaatacatcttcatctccaatagtgacttccttggcatcaccgtgctgaactgtgtccttaaggacaagcagatgggggtcatcatactgacgttccctgatacgatcataaagagaagactgagaaaccacacaagccaaaactcgactcggctcggaaacatccaatctacaaactggttggccaaggcctgaacatccaaggctaaaggcctctctgctaccggtaaatatgctaagctgcccaaactctccgccttacgactcaaggcatcggccactacattggccttcccaggatgatagagaatggtgatatcataatccttaagcaactccaaccatctccgctgccgcaaattaagatccttctgtttaaacagatgttgtagacttcggtgatcggtgtagacctcacaatggacaccgtacaaataatgccgccaaatcttcaaggcatgaacaatagctgctaactcaaggtcatgtaccggataattcttctcatgtacctttaactgtctggacgcgtaggcaatcaccctaccgtcttgcatcaacatgcgccgagaccaatacgcgacgcatcacaatacacagtataagaccttgaacatgtaggtaataccaacgcttgtgtcggtagtcaaagtgatcttgagcttctgaaagcttaactcacactcgtctgaccctgtaaatggcaccctcttgggtcaatttggtcttaatagttgttcataatcaattacagaatcgtcatttaacctcatgttaacaaaaatctcgttgcaaaccttcacaatactgataactagatgcgaggcatgaagacctcataattatttacccgaattaacgagtcacatttaacgccacctaggcgggcacctacctcgtaggttaaaaattaataattacaacacgaatttgacaactatgcacagagaatttcatataagaattttcaaataagcctaacaggcatgactccctattagtactatagtacaaatttaatttcacaagggagaacttaaacacaagaattttcctcacaaggatctcgtccttatataacttccaccgcagctcgtagcccggtttaaacatatcaatttatataaaaatgtgaggatctcgtcctcagttctgaatcacaagtaatatgcacatcgtgccaattgaaaatttccattttctccttttaaataatttcggttacaccaaatcacaacacataatgaaccccacaccggtagggcatataattcacaatttgcaattaattattcggaatttacatcaaaatttaccgaaatgagtaacagaaagccacatttagcctcgcagctcttattagtgaccaacacgaaatgataggcgtagttatctccataaaatctcccaacaggggtaaacacataagtagattatagaattatgaagctcactcataagtggagcacaataggaggactcgtttcgatactgagaaccgaatcaagttaaggaaattattcctttatattaaatcgaggtcgtacctgtaacgacaccatctgatgtagcgacctccgccataccgtaaaacaaatatatcaacggctgggtctccacctctaggacgccttttacccgtctgtcctccacccctaactggtcgtgtgggtggtgtagtaactgcaatggggcacgtagcctgagtgctttgatgaaataagtctctcccaagtttgggacaattttctcatgatgtgcctagtatcaccgtattcataacaacccctttgcgggttaggctgctcatattgagtctgtgccagataactggaataaccattgtaggaactcatgtcggtggtgcattaaaagaacttactggagcaccccgagtaatccgatgtgcagactgggctggacgactgcctgagccaagtgggcggtgttgcattggctggtctgccctcttcataggcttaccacgaacactggtggagaattatctctcccaaggcaaatttcttcttttgttatgctgactcaacactgttgagctgacccatttcttaacatactctttgattcttctttggggtaacccttacccctatttatacacaacgatcacaaaagtagagctccatacagacaaatcttggcacgaaccacatagtccagaatctcgtcaacaactgtacttactccgaagcaccccaaaatccgcaacagtgacgtccacgctgagtagaccttctacaaatttagagttgtttctataactcctttggtattgaagtataggattattaaggaggcggacataccgcaagtcccaaccttatcctctacaaaatctcaggtcttaaacatgtgtaaattttagggaacctttcagtaccacatatatacatttcaggccaaaactgatataatacatgaccccgcaatccacccattggtagtggactccccctactcgcgcgaagtcataggtcacaacgtccgatgatccacaataataaccttcacagcttgtataaatcaaccagacgccaatgtccgttgcacccccacatgattcactaggtgatctctcaatacgcccacatcttcagtcggaaccacacgttgaggcaatgtttgagcatctctggctccctcgtagtccatctgcggcatcacgaaccgtcgacgcacaactgatattgagtgcgcaatgtcatacacgagtggatacaaaggaatatgagatatatgtttcaagctaaatcaatgccgcacgataaggaatcaaagaagtgaatattttcctaacagttccatagcctcccgaagataagtacagacgtctccgtaccgatccgcaagactctactaaacctgcttgtgactcataacacctatgaacctagtgctctgataccaacttgtcacgaccccaaattccctccgtaggatgtcgtgatggcacctagtctctaagactaggtaagcctatcaatgcggaataataataaatatctgaaataaataaactacaattcaaacaatttcaactcccaaaacccggtagaaataagtcacaagcttctaagaatttattctcaatgtctctatatgtcaaggtctaaataaaatataaggaagcaacataaaatgatagaaggggactccggagtctgcggacgctggcagatatacctcgaagtctccgtgcgcaggtaactcactgacgtctaggctggtaaaatgtacctggatctgcacaaaaagatgtgcagaagcgtagtatgagtacaccacagcggtacccagtaagtgccaagcctaacctcggtagagtagtgacgaggtcaggtgaggccctactggaatataataatggcatggtaaaatgtttatcaatgtagtaaaataaaatgacattgaaaatgaatcaaatagtatgtcacatttaatgacaccaaataattgcaaataatatctcgtggaatcaaaacagaatttccttcaactttatgaaaatcacaacaataatcaaaggcaactacggccataaatcaatatcaacaagggcactcccgaggtaccgcctcgtagtcccaaatcataaataaattcacaatatctcatttccttatatcaccgcgggagccttcacaatttatttaaagaaaataatttttccgaaatagcatcccgcgttttacccacccttatcacaccgcatgacttctagtagttccccttctagccacgcgtatcaagccacccttatctcaccgcatgcgtttcaacacccagaccttataccaccgcatgcgtatcaatatcacaatatatcacaatttgcacctcaagtgctcaaataatttaacttgccaaaataattcaacaacaatatttttccacaataaagagctcaatgaacaaatgagatcaatgtcaaaataattcaacaataatattttttcacaataaagagctcacggctccatcacaatgagtataaaaatattcaggagtaaataatttaggaaaataatatttcaaaatctttaatacgttgcttcaatatcaagtttaaaaatgtcaaatacttcatattaataatatttaatttaaagaaaatcaaccttcaaataatgcacagaataaaagaaaccaagtttcaactaaacaggtaaaacaattagcaggaaaagtcaaacaaatttaaagtatatatctcaatcaatgatgaagaatataacaagataaaataatttaattaatgcgcaacagtgatctacacaatttaaaaatataatctttcacatttagcccgtgtacacactcgtcacctcgtgtacacgactttcacacatttcaataatcacatcaataccaatcctaggggaaattttccccacacaaggttagacaagtcacttacctcgacttgctccaatttaaccaagtagtatgctttttcctcgatttttcgactccgatcgactcgtatctagtcataattaattcgatacagtcaaaaattatagaatcaatttcataagaaaatattatatttttcaataaaatccgaaattagctcaaaatttgcccgtggggcccacatctcggaatccggcgaaacttataaaatccgacaacccattcaattacgagtccacccataccaattttaccaaaatccgataacaactcgacctccaaatcttaaattttcgtttttggaagattttgcaaaaatcttgatttttcttccataaattcacggattcatgatgtaaatgagtatggaatcatgaaatataatcaatataggataaggaacacttaccccaatgttttcccgtgaaaatcgcccaaaaatcgcccaagaaccgtgctccaaaaatacaaaacgaaatgaatgaaatgaccatttttggtccttaactttctgtcaatccgtcactaaaagtccatttcccgtcactaaaagtccatttttcgtcactaaaagtccaccagaaactgctctaccagccttccttcaattgatcataacttcatgtacaaatgtccaaatgataaatggtttaacttttcagaaactataatccaacgactacaactttcatgttttgaaaatattctgattccttatgaattgcgatatataagcttccaaagtaggcttcacgcatcagaaatttctggcgaaactgctctaccagccttcattcaatccatcataactttctgtaaacatgtccaaataatgaatggtttaactttctggaaactatgatcaaacgactacacctttcatgttttgacattgttctgattccttatgaattacgagatataagcttccaaagttggctccacgcatgcaatttctgcaacagaaatttctgcaacagaaatttctgcaacagaaatttccagcactctttgtccgaaatccattccgtttaccttccgaaatccacccgagaccctcgggaccttaaccaattattccaacatgtcccaaaataccatacgaacttagtcgaggcttcaaactacatcaaacaacatcaaaacgacgaatcgcacctcaaatcaaaattaatgaactttgaactttcaaattctatatcttgtgttgaaacacatcaaatcaattcggaatgacttcaaattttgcacacaagtcataaataacataactgagctatgaaaagtttcagaatcggatttcgactccgatatcaaaaagtcaacccctcggtcaaacttcccaataattcaactttcggcatttcaagcctaattccactacggacttccaaataaaattctgatcacgctcctaagtccaaaatcaccatacggagctgttggaatcatcaaaattctattccggggtcatttgcacataattcgacatccggtcactatttgaacttaaactttaaatttttcatcaaaattccatatctcgggctagggacctcggaatttgattacgggcatacgtctaagtcccaataatgatacggacctaccgaaactgtcaaaacacttatccgagtccgtttgctcaaaatgttaaccaaagtcaactcaattgagttttaaagctctaattcacattttaatccatttttcacctgaaaacttttccgaaaattttttacggactgcacactcaagtcgagnnnnnnnnnnnnnnnnnnnnnnnnnnnnnnnnnnnnnnnnnnnnnnnnnnnnnnnnnnnnnnnnnnnnnnnnnnnnnnnnnnnnnnnnnnnnnnnnnnnnnnnnnnnnnnnnnnnnnnnnnnnnnnnnnnnnnnnnnnnnnnnnnnnnnnnnnnnnnnnnnnnnnnnnnnnnnnnnnnnnnnnnnnnnnnnnnnnnnnnnnnnnnnnnnnnnnnnnnnnnnnnnnnnnnnnnnnnnnnnnnnnnnnnnnnnnnnnnnnnnnnnnnnnnnnnnnnnnnnnnnnnnnnnnnnnnnnnnnnnnnnnnnnnnnnnnnnnnnnnnnnnnnnnnnnnnnnnnnnnnnnnnnnnnnnnnnnnnnnnnnngtttatttctagcacgattacagatatttgtagatatttttgcgttagtgataaaataatgtcagtttcaatggataatgctactgtaacacaaatgttgtagcattgcttaccactacactaagtcctgcatttagtaatatttttcatgttagatgtatttgtcatatttaccatttaattatgggtgatggtatgaaattttaaatgttgaaattgaaaaggttaaaatggctcttaattggcttttttattcaaaccgtagaagtagacttagagaatattttaaaagatgcgatgaatttggcctaagagaaagaaagatttctaaaccttgtccgattagatggaattacatgtatgaaagtttagttgttgcatatgaatatagaaaccccataaactcaacgtttaatgctcatgtaagtgatgatgatgagcaccttacaaatgcggattgggctaatgttaaaatacttgtagattttttagaaaaattttatattgctacaaatgaattttctgggcaatattatcctactatttctaactgtttagtttatattgcagaacttgcaaatttgtttgatcatttttcagagggtggagaaatttatcaacttgctattgattccatgagaaaaaaatttaaaaaatattttttccctattccccctatttatggtgttgctgcattgttaaatcctactatgaaattaggaggtcctcaattttggtatgaaactgtttataatggtttagcacttgaagatgaggagttgtctacacttgcggacgcaatagcctcaattaaaataaatgttcaaactatttataatgcttatcaagttgcattagatcatgctagaccaaatgttccaactccttcttcttctagttctcaatcatctaaaagaactgcgggagtaagagcacttagtgcttgggcagggttcaggggttctcaaggttctagtactagtgatttttcacaactaaatgagcttgaagtttatttgtcacagggaattgaggaagtgaatcccgacggctcctttaatattttggaatggtggaaggacaaagaaaaacactttccgattctttcaaggatggcccgagacattttaaagtttaatgcttcaacaatggcatcagagagcgctttcagtcaagcaagacttcaactcggtgattatagagcgtctatgagggagaacttggaaaaatgagtacttttcaaagattggatccgttcggaaagaagaaattttggacttgctgaatcacaaccagaggtagacgaagcttacgaagaaatgnnnnnnnnnnnnnnnnnnnnnnnnnnnnnnnnnnnnnnnnnnnnnnnnnnnnnnnnnnnnnnnnnnnnnnnnnnnnnnnnnnnnnnnnnnnnnnnnnnnnnnnnnnnnnnnnnnnnnnnnnnnnnnnnnnnnnnnnnnnnnnnnnnnnnnnnnnnnnnnnnnnnnnnnnnnnnnnnnnnnnnnnnnnnnnnnnnnnnnnnnnnnnnnnnnnnnnnnnnnnnnnnnnnnnnnnnnnnnnnnnnnnnnnnnnnnnnnnnnnnnnnnnnnnnnnnnnnnnnnnnnnnnnnnnnnnnnnnnnnnnnnnnnnnnnnnnnnnnnnnnnnnnnnnnttgccgtaattttttaatgctataataaaattataatgcattgctttgaatatctctttaaaatatttttgtctttttatatatcttaagttgtatatatagtataatatagtatatactataatatactatactatatatatataatatatatatataaatcgaatatagcttatatatattaagatgtatatatagtatagtatagttatatatatatatataagcgtatatatatatatcgaatatagcttatataatactatactatatatacatcttaagatatatatatatatatatatatatatatatatatatatatatatatatatatatatatatatatannnnnnnnnnnnnnnnnnnnnnnnnnnnnnnnnnnnnnnnnnnnnnnnnnnnnnnnnnnnnnnnnnnnnnnnnnnnnnnnnnnnnnnnnnnnnnnnnnnnnnnnnnnnnnnnnnnnnnnnnnnnnnnnnnnnnnnnnnnnnnnnnnnnnnnnnnnnnnnnnnnnnnnnnnnnnnnnnnnnnnnnnnnnnnnnnnnnnnnnnnnnnnnnnnnnnnnnnnnnnnnnnnnnnnnnnnnnnnnnnnnnnnnnnnnnnnnnnnnnnnnnnnnnnnnnnnnnnnnnnnnnnnnnnnnnnnnnnnnnnnnnnnnnnnnnnnnnnnnnnnnnnnnnnnnnnnnnnnnnnnnnnnnnnnnnnnnnnnnnnnnnnnnnnnnnnnnnnnnnnnnnnnnnnnnnnnnnnnnnnnnnnnnnnnnnnnnnnnnnnnnnnnnnnnnnnnnnnnnnnnnnnnnnnnnnnnnnnnnnnnnnnnnnnnnnnnnnnnnnnnnnnnnnnnnnnnnnnnnnnnnnnnnnnnnnnnnnnnnnnnnnnnnnnnnnnnnnnnnnnnnnnnnnnnnnnnnnnnnnnnnnnnnnnnnnnnnnnnnnnnnnnnnnnnnnnnnnnnnnnnnnnnnnnnnnnnnnnnnnnnnnnnnnnnnnnnnnnnnnnnnnnnnnnnnnnnnnnnnnnnnnnnnnnnnnnnnnnnnnnnnnnnnnnnnnnnnnnnnnnnnnnnnnnnnnnnnnnnnnnnnnnnnnnnnnnnnnnnnnnnnnnnnnnnnnnnnnnnnnnnnnnnnnnnnnnnnnnnnnnnnnnnnnnnnnnnnnnnnnnnnnnnnnnnnnnnnnnnnnnnnnnnnnnnnnnnnnnnnnnnnnnnnnnnnnnnnnnnnnnnnnnnnnnnnnnnnnnnnnnnnnnnnnnnnnnnnnnnnnnnnnnnnnnnnnnnnnnnnnnnnnnnnnnnnnnnnnnnnnnnnnnnnnnnnnnnnnnnnnnnnnnnnnnnnnnnnnnnnnnnnnnnnnnnnnnnnnnnnnnnnnnnnnnnnnnnnnnnnnnnnnnnnnnnnnnnnnnnnnnnnnnnnnnnnnnnnnnnnnnnnnnnnnnnnnnnnnnnnnnnnnnnnnnnnnnnnnnnnnnnnnnnnnnnnnnnnnnnnnnnnnnnnnnnnnnnnnnnnnnnnnnnnnnnnnnnnnnnnnnnnnnnnnnnnnnnnnnnnnnnnnnnnnnnnnnnnnnnnnnnnnnnnnttctctaacttgtataaaaaaaaattaaaaaatagaaagtatctgttgggctcgcttgagcccgcttaggcccgggaccggcccacttaatccgggaccgttagttcgtggtcccgctcccggaccggttccaatgcgaagcccgggaccgcttaggaccggcccacttagaactgggcccgcgaaatccacttaggaccgggctcggcccacatgtcacccctattattggtattggactgacttagcaaaagtattattaagacatttaatttgaatatagaatgttagcatattgaaaaaaaacaaacatatcctaaaacgtggggataatatttatattaaattttaaactctagctaacagttttgattttattacacgaaagagactaataggctaaaatataaaatatagtagtggttagttgtaaacttgtaatattttgatctacggtccaagtcacacgaatcattaaactttttcgagttttcattattttaaaaaataataattcttcccaacaaccatgctcttaagagttaagacaatacaaatgaaatactctctccttccgtttcaatttatatgaacatatttgactgtacacggaatttaagaaaaaatgaagacttttaaaatttgtgatcctaaacaaatcaaaaaagagcctatagtatttgtgtggttataaaagcttctcattaagggtataattataaatttaagctaaattatttccaaatttagaaagaggtcattcttttttgaacggaccaaaaaaaaatagattcacgaaatgaggggagtaatactttatagttctataattaattagtaattaacttcctttaattattctaatccggatcatttcaaaagatcttcactaaaataattttacttgtttaatgtataagaaaatagtgaaaaaggaagtaatagcaattcacagcacatacaagctgaccctggtgttctactcattgaagtgtttcaaaatttaaacgttgattttaggaaacggccaaatacataaatagttcttttaagttgttctcagtgatcatacatgcaccccaacttatccctttaccattttaatacttcaattattgcttgtatgtgctaattgctatggtttttctagaagtattatttaattataaaattatttttgcccgcattatatatatatatccctttcttgacatttgtatttgaaagagagctatgcttaggttagttccttcagtcaacttttttggtaagttaaaagtgaactttaggtaagtaaatttcataatacattcacatatatatatatatatatatatatatatatatatatatatatatatatatatatatatatatatatattatcctgaaaatattaacacacctttttctctacaagtttgtaaggggtgacaaagccaaaatgtttcaataagcaggcaaactaattttattcaacatcttttggaataattcggattcgggcttttgtatatttattaggcgcaaaaagaaaaattgaaatgcattttgttgatttacttaaagaagtattatggcatttgtgttcgttgtcttatacgctctttacgaatggttactcatctttggaataattagctattaaagttatgtaattttttttgtgctaaaaaatcactcaattttatatagttcatttaaacgtaaaatttagtgacatgacaaaaattaatttaaaaagaagtcattaaatagtactacctccattccagtttacgtgaacctattttttttttggtctgatccaaaaaaattatctctttttaaatttggaaataaattttgcttaaacttacaattttatccttaatgagaagtttttataactatacaaatactctgggtccctttttaaattgtttaggatcacaaattttaaaaatctttattttttaaaaaactattcgactagtcaaacaagttatcctaaattattggaatcggaggaagtagtttaaaagctgaaatattttaaaacacaacccatccatttattcagtatacctgaccggtcccacaattgcagtttcacgaggaaagggaccaccacgtgttggaacagtaaatataatgaggtgctttaataaataataataaatgtattggtctgattatggtataatttatatgtgctgattcatgtcttttttttttgtttttttgttttggtagtgatagattaccggcgctaaaataaagacagttaattattattacatccggtccacggcaagtaattttttggtctttttgtattctaaaataagtgattttttcagattttaagaatgaattacttattttttttttctacattacccctgagtaaataatattggagtatgtattaggggtgtttatgtgaagagatagtaaatgttaatatggtcaaattcattgctacaacaacaacaacccagtataatcccactagtggggtctggggagggtagtgtgtacgcagaccttaccccaagtgggttgctctagtggtgagcatcctccacttccaaccaagaggttgtgagttcgagtcaccctaagagcaaattcattgctaattaatattatgaatttgctcttggggtcaaattcattgctaattaatgttaaaagatgaatttcttaatctgtgtgaaaaattcaaaaaattacttattgtagaccggagggagtattatgattttggtggctcattatgatttagtgttacaacaaatggatgtgaaaagtgcttttcttaatagagatatcaaggaggaagtttatatgagtcaacgagagcgtttcgaaagcgtttcgaaactgaagaagtcaatatatgaacttaaacgagcctcacgacaataatattattggtatataaagtttaataataccatagcatcttttggatttgcaaaaaataccgttgatcagtgcatatacccaaagattagtgggagcaagtttatatttttagtcgtatatgttgacgatattctacttgtagctaatgatttaggcatattgcgtgagactaaagagttttcactactagaaattcagcaaaaaccaacagcggtcgactgaccgattttggtcggtcaaaaaaccggcccaaaacacgaccgaagtcggtcggtttttcaaaatatttatttttaatttttttttacgaaatcgaccaactttggttgatttgctttggcgcaaaaatacggaaaactatttttgaaccccgcaaaatttaattttcaagaaaccaaccaactcaattagttttctttggcgcaaaaatacaggaaactatttttgagtctcgcaaaatttatttctcaagaaactgactagccatttaaaaaccgaccgaattcagtctgtaattttattttttaataaaaccgaccatattaaagagtataaataaaataaaagggagacaaaaaaaatgcaccaatggtctagtggtagaatagtatcctgtcatagtacagaccccagtttgattcccagatggtgtatattaaaataccgaccgactttggtcggaaaaaaccgaccaattgcgatcagttttttcagcaattttttttaaatttaattgaccgatcgaaatcggtcggaaaaatactcaccaaagtcagtcggctagctctaccgacgttacgattatcgaccgccacgaatcaatcggtctcgatcaatttttgccaattaccgatcaacatcgatcggtttttccccttttttagtagtgttctctctaagaattttgaaatgaaagatatggatgaggcaacctatgtgataggaatagaaatattctgtgatagatcacaaggattattgaaattatctcacaaaggctatatcgaaagagagagatttaacatgaacaaatgctcatcaggaatcgttccaattcaaaaaggggacaaattttgtctcatggaatgccctaagaatgatgtagagcgaaaagaaatggaatcatttacttattcttctattattggcagtctgatatatgctcagacttacacaagactggatattagttttgctgtcggaaatgctgggaagatatcagagtaacccatgaattaatcactcgggagctgcacagaaatttttgaggtacttgaatggaacgaaggattacatgttcatgtataggagatccaagcatttgtaagtttttggatacttggattcagatttcgctggatgtattgacactagaaagtccatgttttgttatttgttctaattagttgaaggagcaatatcgtggaagagtgtcaaacagcctgtcattgctacctccacgatggaagcagaatttgtggcatgttttgaagccacaattcatgcattatggttgtgaaactttatttcaggaattggggttgtcgacaccattaccaagtcgctgaaaatttattgtgataattctgcagcagtattcttctccaagaacgataagtacttcaaatgtgccaaacaaatggaattaaagtcttttaccttcaaggaggaagttcaaaaacaaagagtgtcactttagcatattagaattgatctcatgattgcagatctgttaacgaaaggtttatggccaaagatattttaaaaacatgtacatagaatgggtcttgattatatttatgatgttttgacactctaagcctacttatatatttctgatatacattaatgatttcatatttctcataatggtgtacacaatattgttttgagatattacaggataagtgtcaacgcgatattattatggaccataatattttatagcttatggacttggtacaatgagttgctaatgttgtagtatatgaagggactatgtagacaaattatgtatgaccgccataactcacatttcgtagtttatcgtattatggtatttatgatggacattatagaagaaatttttttatgcgcaactaatgtttatattattaaatattaatattatgtgattattgggacaggtgaaagaatgtaagttgttttttctacatgtgtgtgtgtcccaataggtttaaggctaattaatacttaaatgaaagacaaatctcgcccgtacgatcggttacttgattgacgtacaagattaagtgaggatatatataaattggttaccctccacctattagggttattacctattttattcttcttttccatcactaaagttggtggtaacgaaagctagggtaagggacgagataccaatttaccaattaacgcttccgcttcatgataatggcttccgcttcaggtatgttttctttatcgattatatgtaagattatcatgttcaaaatcttggaatgaattaaagttaatgcgtacaatatgtactagtagtatctccatcgtttaatcactactattattaatagtaggagtaggaataaaagtatgtgttgataataccatcatcattatctttataattagttaagaaaaatgtgttatttttattttgcaatttattttttaaaatcttacttagttaagatagagcaatagggtgcatctttaatataatttttatgtatatggtaaaatatgatatgacatgtggctggctagaaggaggatacatggaattcaagatggcatggctgaggaccgaacacagctactccgtttgtcaccggaaaggataacgttcgtaaaagtgtattaaatgctctacgcccggtagcatttactaaagaatattctgcagcattaagagcgatggtcagttacagagaattcagtatttatgttcaccgttacatcttcatcaatgaccctcataattggtattaaatgagggtatgatcctatgaccattttccctagacgtaactataaatagtgagctctgttatcattgtaaggggacgaattttctagcaagaacatatactatattctatacaaagctttacacaactttactttctttctttttgatcttatcattgctatgttcgaaaaccgtgttcacaaaatcactatctttgctattttatctacattataaggctaagtattgtgtattttttcgattatcatattatttcaggatcaaataagttcacatgtctagaaaccgcgaataaattaaactgtgccattttatggttaaacagtttggcgcccaccgtggagcctagacatccgtgcaattaaattgatcctttcctcttttactaatgtattttgattattttatcttagaaaaaatcacaaaaatggcagataacactgttaatgatgcacacaaccctgaaattccaagggtgaagttggctctgatgggcctagaggaagcagatcaggtcttaacaacgagaacgatttattgaaaggcccgcatggattatataccgcgcgcaccaccaatattgaaaggccggaactcgaagaagtatgtttaactatcgtacaagccaagtgtgacactagaactaatcccgaagcgttccaaaatgcttgaagttccaaaatttggaacttctgatccacaggaacatattaccacctataaaggcgatgaaaggaaataatctagcatctcacggaattaaatctgtgttgctataacaattcggcaaaactctcacgaggggatccctaacgtggtatatatcacttcccgagcattccatagattcttttaagatgctcgcagattctttcattaaaactcacgctggggctagaaaggtacaagcgcggaaggccaacatatttagaatcgcacaaggagaatctgaattattatgagagtttgttacctgatttcagaaagaaagaatgttactcccggccatcccggatgaatgggaagatgaagcattcaccaaagaattgaatccgagaagttcatatgcttcccagaagttgaaggaaagattgcttgatttttaagcaacaacctgggtggatgatgttcacaactggtatgagtcaaagataaggatcgaagatgactaggtcggttctacatcatcggccaaaggatgagagaataacaaagaaaaatcaaaggatgactatgacgcggatatgcgaacttcaaggggtcggtttttgccctacgagagtaccgaaagccgtggtagaaatttccaagcaacaaacaagtccatcgttgatagagggactgaccgtggtggaaacaatatatcacttcaagataaagaaacgtcggggtatcgagatatttcttacccctggttattagaatataacttcaacgtcagcgtagtggaactggtatcatccatgaggaacacggttcccaagacctatgagctctaattccaaccagagggattccaatttatagtgtgaataccacgggatgaacagtcactggacatgggactgccgacatcttcgggaggaggtggcaacgctattgaagaatagtcatctatgagaattcttgagtgatcgagctaagttcaattacagtcgcaacaaagacaatacgaaatcttcaaaagaaggagaagaagccccacgccagtcgatcaacatgatctttggggggaacgagattaacggggtcaccttttttgtggcaaaaaagactaaagtatcgataactcagagcaaaggactccgggaggacgatatcactttcacggagaaagatgcagacggattgttgttaccacacaatgatgcactggtaatctttttagtggatctaggaagttcggctaatatcataaaattgagagtattggaacaagctaaactcaccggaagcattatttcggcaataaaactcctcgttgaattcaaccttgcgagcgtgacgacccggggagagatcttgctactcacaaacgctgaagaagtaattaaaacaactctcttcgaagtagtggatggtcatatgggatacaacatcatcttaggaaggctgtagctacacgagatgaaagttgtaccttcgacatatcaccaattgttgatgtttccaatgcccgaaggaagcaagcagataagaggtgaccaaccgacaggaagggagatgaatgcaagctcagtttcctgtagcaaagggaaggagcacacgacattgtaattacaggaatcggtgcctactcccgagttagaagaggttattctagaggcagaatcgtcagaacagtatcaggtgctgagatatttccaagttccggaagagacagacgtaatgaaatccacggaagaggaactagagcaagtgacattgttcgaataattcttagaaagaaaattttcacttggggacgggactgcaccccgagctcatgtctggttttattgaattccttaaaattaacgctgattattttgcatggtcgcacgaggatatgacagatatcccgacgaaaatagtcgtgcacaaacagagtttggatcccaacgcaccaccagtacgacaaaagaagcgctctattgcccatgccaggaataaattcgtcaaagaagatataacccgcttgcttaaaatcggttcggtctgagaggtaagatatccagactggctagctaatattaaagtagttcatatggtgtcatgaccccaaattccctccgtaggttgtcgtgatggcacatagtctctaagactaggtaagcctattaatgcggaataataataaaaatatgaaataaataaatcgacaattcactgaattacaactcccaaaacccggtagaaataagtcacaagcttctaagaatttatcctcaatgtctctatataacagagtctaagaaaactaaggaagcaacataacaagaatagaaggggactccggagtctgcgaacgctggcaggtatacctcgaagtctccgtgcacaggtactcactgatgtctgggccggtaagaagtagctggatctgtacaaaaaaatgtgcagaagtatagtatgagtacaccacagcggtacccagtaagtgccaagcataaactcagtagagtagtgacgaggtcaggtcaggccctactagaaaataataatcaatggcatggtaaaatattttacaatataataaaataaaatgacaatggaaatgaatcaagtagtaggtcaccatttaattacacaaataatgacaaataatacctcgtgaaacaaaacataatttcttttcaactttaagaaatatcataacaaaatcaaaggcaactacggccataaatcaatatcaataagggcactcccgatgtacctcctcgtagtcccaattcataataaattcacaatatctcattttccttatctcaccgcggaagccttcaaaatttatttttaagaaattattttttccaaaatagcatcccgcgttttagccatccttatcacaccgcatgacttctagtagttcccctactagccacgcgtatcaagccactcttatctnnnnnnnnnnnnnnnnnnnnnnnnnnnnnnnnnnnnnnnnnnnnnnnnnnnnnnnnnnnnnnnnnnnnnnnnnnnnnnnnnnnnnnnnnnnnnnnnnnnnnnnnnnnnnnnnnnnnnnnnnnnnnnnnnnnnnnnnnnnnnnnnnnnnnnnnnnnnnnnnnnnnnnnnnnnnnnnnnnnnnnnnnnnnnnnnnnnnnnnnnnnnnnnnnnnnnnnnncactgcatgcgtttcaatacccagaccttataccaccgaatgcgtatcaatatcacaatatatcataatttgcacctcaagtaatcaaataatttaacttgccaaaataatttaaccacaatgttttgccacaataaagagctcatggctcatgccaaaataaatcatcaataatattcaggaataaataattcagcaaaataatatttcaaaatctttaatacgttacttcaatacnnnnnnnnnnnnnnnnnnnnnnnnnnnnnnnnnnnnnnnnnnnnnnnnnnnnnnnnnnnnnnnnnnnnnnnnnnnnnnnnnnnnnnnnnnnnnnnnnnnnnnnnnnnnnncatattaataatatttaatttaaataaaaccaacctgcaaataatgcatagaataaaagaaactaagttccaactaaacaagtaaaacaattagcagaaaaaaggtcaagcaaatttaaagtgtataaatcaaatcaaagatgaagaatataacaagatgtaataatttaattaatatgcaacagtgatctacacaatttaaaacataatccttcacatttagcccgtgtacacactcgtcacctcgtgtacacgactttcatcacattataattaataccaatcctaggtgatatttcccccacacaaggttagacaagtcacttacctcgacttgctccaatttaaccaagtagtacgttttttcctcgattttccgatttcggtcgactcgtatctagtcataattaattcgatacagtcaacaaaaattatagaatcaattctataagaaaatactatatttttcaataaaaatccgaaagccaatgtcccgtggggcccacgtctcaaaatccgacaaaagttatgaaatatgaacgcccattcaaccacgagtctaaccataccaaaatgactaaattccaataacaattcgtccctcaaatcctcaaatctatccaagagggttttaaaaattttccaacttaaatcaccaattaactgataaaaacagtgatggatttggataatctaaccaaaattgagttaaaaacacttaccccgatgttttctctgaaaatctcccaaacctcgcctcaacccgaactccaaatcgttaaaaatggaaaatggttcgtcccattttcagaacttaaactctctgcccaggcttttactcttcgcgatcgcgaatatccacacacgatcgcgaagtacaaaattccgctgcccagatataactctacgcgatcgcggaaaatcccaagcgatcgcgaagcacagtctccgcaagcctacgcgatcgcaagccttctcacgcgatcgctaagcattaagcgagtggcccagcttctgcctcgttactctacgtgaacgcgaccttcttcacgcggtcgcaagccacaaaatatcaaagctatgcgatcgcatcctgcttcacgcgattgcgaagcacaaaactcagtagccctcaattaaccttacacaatcgcaaacaatgccacgcgatcgcgatgcacaacttgccaaacctacgcgatcgcaattgaactcacgcgatcgcgaagaacaaaatcaacactgcctcaactaagcctatgcgatcgcgtcccaatcttcgcgatcgcgaagaaggtttaaaataccagaaatcagcagctaccaacagtgccaaaatgaaggaaaatactcnnnnnnnnnnnnnnnnnnnnnnnnnnnnnnnnnnnnnnnnnnnnnnnnnnnnnnnnnnnnnnnnnnnnnnnnnnnnnnnnnnnnnnnnnnnnnnnnnnnnnnnnnnnnnnnnnnnnnnnnnnnnnnnnnnnnnnnnnnnnnnnnnnnnnnnnnnnnnnnnnnnnnnnnnnnnnnnnnnnnnnnnnnnnnnnnnnnnnnnnnnnnnnnnnnnnnnnnnnnnnnnnnnnnnnnnnnnnnnnnnnnnnnnnnnnnnnnnnnnnnnnnnnnnnnnnnnnnnnnnnnnnnnnnnnnnnnnnnnnnnnnnnnnnnnnnnnnnnnnnnnnnnnnnnnnnnnnnnnnnnnnnnnnnnnnnnnnnnnnnnnnnnnnnnnnnnnnnnnnnnnnnnnnnnnnnnnnnnnnnnnnnnnnnnnnnnnnnnnnnnnnnnnnnnnnnnnnnnnnnnnnnnnnnnnnnnnnnnnnnnnnnnnnnnnnnnnnnnnnnnnnnnnnnnnnnnnnnnnnnnnnnnnnnnnnnnnnnnnnnnnnnnnnnnnnnnnnnnnnnnnnnnnnnnnnnnnnnnnnnnnnnnnnnnnnnnnnnnnnnnnnnnnnnnnnnnnnnnnnnnnnnnnnnnnnnnnnnnnnnnnnnnnnnnnnnnnnnnnnnnnnnnnnnnnnnnnnnnnnnnnnnnnnnnnnnnnnnnnnnnnnnnnnnnnnnnnnnnnnnnnnnnnnnnnnnnnnnnnnnnnnnnnnnnnnnnnnnnnnnnnnnnnnnnnnnnnnnnnnnnnnnnnnnnnnnnnnnnnnnnnnnnnnnnnnnnnnnnnnnnnnnnnnnnnnnnnnnnnnnnnnnnnnnnnnnnnnnnnnnnnnnnnnnnnnnnnnnnnnnnnnnnnnnnnnnnnnnnnnnnnnnnnnnnnnnnnnnnnnnnnnnnnnnnnnnnnnnnnnnnnnnnnnnnnnnnnnnnnnnnnnnnnnnnnnnnnnnnnnnnnnnnnnnnnnnnnnnnnnnnnnnnnnnnnnnnnnnnnnnnnnnnnnnnnnnnnnnnnnnnnnnnnnnnnnnnnnnnnnnnnnnnnnnnnnnnnnnnnnnnnnntcccgagcccctcgggacctcaaccaaatataccaacaagtcctaaaacaacatacgaacttaatgagtcttcaaatcacatccaacaacactaaaaacacgaatccaacgtagactcaagcctaatgaactttgaaattttcaatttctacaaacgacaccggaacctatcaaatcaagttcgattgacctcaaattttgcacgcaagtcataaatgacataacagagctgtacatatttcggaactggattccgactccggtatcaaaaagtcaactccccggtcaaacttccaaacttaaattcctattttagctatttcaagcctaatttaattatagacttccaaataaaatttctaatacgctcctaagtccaaagtcaccatacggagctgttagaatcatcaaaattttatttcggggtcgttttctccatatgttgaccgaagtcaaacataacattttaaggccaacttaaggaaccaaatattctgatttcaacccgaacccttccaattcccgaaccaaccatccccgcaagtcataaatttataaaagcacatacaaggagttttatttaggggaacagtgttctaaaagtcaaaatgaccgattgagtcattacatatggagaacaataaattttgtatgtgtgtagactataaagatcttaataagacgtgtctgaatgattcgtttccactaccaaatatttttcaaatgattgaaccaaattaaaatgaacctggaagatcttaatatgattttccttgatgcttatgcgaggtacaaccaaattaagataaaccaggaagatcaagataagacttcgtttataacaaatttcggtatatattgttatattgtggtgactactttccctttgcagaacatccttcataaactcgagctctagggaagattggcctaatgggccgtcgaaatgagtgaacccgacattgaatataaatcgaggactgcaattaggtcacaagtcttggatgacttcgtgcccgattttagccttggactgctgtctctggcaactaaggatgcagtaatggtgttggagtcaacatcaggggtttggatattatttataaacggagcctcaaacgaagggtccgggctcagaatagctttaatcacgcctttgggggaaacattaaggcaagccattagcacgatccatttaactaacaatgaagcagagtatgaagttgattgcagggctcgaattggcccgaggacttgattatgaggttatcaaaatcaaatgtgactcacagttagtggtaaaccagatttacgggatctttgataccaaagaagaacgtatgcaacaatacgtggtaaaggtccaggcttttttggcacgattccgtgagtggtcgatcactcatatcccgagagaggacaatgcagaagcagattcattagcaaacttaggttcatcaatggaaataaatagatcatagtccagaacgctggtagaactgatgagctcagtccttgatataggtggtaactccgaggtgaattcggctagtctagtctgggactggagaaacgaaataatcaactacctcgatcatgaaaagttgcccgataatcccaaagcatcacgatggttacacaccaaggatttacgttatagcttcatgaaaggccaatggtatagaaaatctttccaaggcccgctcgtccagtgtttaggagcatcaaaagctaactatgtcatgagagaaatccatgaagggatatgcagaaatcactcaggcatagagtctttggtgctgaaattggtacgtgcatgatattattagcctcgcatgaaacaggataccaaagatttcataagaaaatatgataaatgccaacgctatgcatcactagtacatcaaccggcagaacccttacattcggttttgtctccatggtcgttcatgaaatgggagatagacatcgtcggaccgctgccaccggctcccgaaaaggtaatgtttcttttaattttgactgattatttttctaaatgggtggaagcaagttcttatcagaagatcagaaaacacaaagtgttcgatttctagttggaaaatataatttgcaggttcagaataccaaaagagatagcatgcgataatagaccgcattttatcggtgcaaaagttacaaagttcctcgaaaacttgaaaataaagagaatcacatcttcgccttatcatccgagcgcaaatattcaagcggagtcgacaaacaaagtgatcatttaaaagctcaagaaaatgttggtagcaccaaaagacaaatggaccgaagagttgcccggagttctatgggcctaccgaaaaatgaccaaatcaagtacaagagaatctccttttcccctcatatacggtgttgaagccctgatcccggttgaagttggcaaacccactttgagatattctcagacaaaagaagaataaaaaatcgaagcaatgctaataaacttggaactgctcgagggacacaaggacttggcgcgtgtgagaatggcagctcaaaagcagaggatagagcgatattataatcaaagagccaactttcatttttttcaaagtaagagacttggttctaaagaaagtaacacaaaatacatgggagctcaatgtaggaaagctaggttcaatgtgggaaggtctctaccggattttagctgtcactaggaaaggttcgtacgcattggagaaccagaatggggacaaatttcctagcaactagaacgtggcacacctcaaatgatattattgttgatgaacgacgttcaaacagaaagcatgtgttgcactctttttccctcgttcagcttttgtcccaattgggtttttctcgcaaggtttttaacgaggcagcgacagaaagcattctacgaagacatcatcaataagacctttgatagcaaggcaaacaaacaagcttctactcggggacgattaggtaatctttgattaaatagcaaattcccactagtgattacccgtaaaatggtatagttgaatttatacgcagtttccagacaggtgaacttatttgatcttgaaataatacgatcattgaaaaaatacataatacttagccttagaatatagatgaaatagcaaagatggtaattccgtaaacatagtttccgaacacagcaatgataagatcaaaaggcaagaatgtgaaattgtgtaaagctttatatagaatatagtatatgttcttgccaaaatatttgttcccttacaatgataacagagctcactatttatagctacgtctagagaaaatggtactggtatcatacccttctttaatgccaattatgaaggtcattgatgaagatgtaacggtgaacataaatgctgaattctctataacagaacatcgctcttaatgttgtagaatattccttagtaaatgctaccgggcgcagagcatttgatacacttttacgaacattatcctttccggtgacaaacgaagtagctgtgttcggtcctcagtcatgccatattggatttcacgtgtcccccttttagccagccatgtgtcatatcatattttaccctatacaaatagtccccctgctttccggtgacataactttgtgttaccgagatgttggtagaaataccttttggcgggaattactataattccctcttaaggtctctcatagttgattagacgcacatctctcctcatttaatgacctaaacacgtgtcatcccatgattcagcagaatgctttccggttatcgaggtaatcatgaccatgaatttagccgccaagagtttacttatacacaacttccttttcctttgcgtttcacaattgcttgagcttttgatctgcattcttgttttccatacctttcctaattttatttaaacacaaactctttacctttttcttttccaatggcatcttcctctaaatgtgctggttgtacaaagaataataacaaaaccgaggattcagttcctccaacagtgggttccatcatcccagaaaggttgagtactttgaaggattttgcagagaaatttcctactgctaaccctcgtacatgggttgttagtaggtacccttcttccattctcctttccagtatccctgttgtgaaggaggaatgccactgcaatgagttggaaattattgctcctgatctatcggagcgggtaacccttcccaaggaaggttttacatatttttaaagcatccatttagtttgtgtgtgttttatttgaggggagagatcgattccgtgattgtggagttatgccttcactaccaggtgtgtttggcacaggtaagtccttcagtgttgaggacggtcgcctttctctgacatttgtgccaagaaactggagaagagctaaccttagctcatatgatgaatctttattcccctaaaatcttcagcgggggaataataaacctttgtgagcatggtcatcatgttgttttttctagtatagatgatgacaatgactgtgggtggatagaacagttcgttgtagttgccaccaatgacatcattccgacaacggcttcatcctttcggttgcctagaaccgcactcgtaagttctttttataatactcctcttactagatattcttctatggtcatatcatctcttcacccttcacatgtttcagcaactcgatggctcccaccggtgggttcagaagatcttggatatcacaacgcacgaaactcgttcgtggaaagaattggcccttaaatacgggtggaaggccaaaattatggtaactttaatttaccttgcttctatttttgtatatgaagaacttggttgaacctttctgactttgttcatagacttaggtgtacctgcgagctctgttattgtccctgaggaggacgttctatcttatcctgctaatgcatcaaggctgtttcaggaagcacttactcgaacaagtatctccgggcctgttttgggagaaaatacttcttcacggagtccccgactagaggataaacaaacaaagagaagactcacctccacagccgaggaaaagaataaaagggcaaagattgatgccctcgaataatatccagtgccgatgatgactggtcctccttctgggccattcatagacaccgtgatgattgattataataaagaagttgttgatgagggagcttctttacacataaggctacgatcctcataatctcaacaggatgcccgacctgttgagatagttacactaactgaagacgatgtctcggcactttggggagaatctgatttggtagaatatgctaactctcgtatgggccccaattgctgcaaccggtgctgcagggctgagtacctggtctttttcgcctttggttggcgagtatcaaataaccagcactgcatttgatgcagttgcttctcactccttaactccatcagcttcatcttcaccaacaccagcaactgcaacattatttccatcttcatctactcttctatcaactcttgctgcaccatatgcatcggacgcacctgaccattaagaaggtgttcctcttccacagtccccaattcatgggaatttggggaaaaactatgccaccccttctgaagatccacaaaggaggaggaacattactcttttggtctctaccgggtgcaacctactatcacggtcagtggatctttctaactacctgaagcctttgacttcagaaaaatactgggaaaagattcagacactcgcgggcgagtgtttgttgaacaatgttatgcataactattgtttgttgaataatgctatgcataatgcctttggcttcctctgttatttcttctacttttgaacagatgtattctaagttttacctcttcttattttataggccaacttttatttctctgacggccttcaaaggttaattcgtgagaaggaagtacttacttttgaacgagatcaacttttggcggaataagaccagactgttcttcacctctcaaaactagaaaccagggctactgaggttgttgttttggaggctcgtttgcatcaaagagagcaagaagtagtaacctttagccaagaaattgggccgctaagggttaattttgatgagtccaaggccaaatgggctgaagtccagaatgtcattcttgctgcagccgactgtgaggctacctctgctgaaagaatggttaaattggaggcatccttgaactccaaaagtgaagatcatgctgctatggaggtgaaacatgcccagctagaaaagaagtacaggaaaaccattgagcataataggctctttagttccactgtctgttagcctgatatcaccctcaaatctgctagatctgcccggaaaaaattttccagtgaggttactcaaaaagaaaaactcaagcgccgagctgcttcccttattacttaagaaacttattccatgtatagcatgaggagaaaaaacattggaagaggccaaatttggtatcattgatgtcgatgccgaaagtactaaggcccgagagcttgagttaggtgcaaaaaatagactcccgacgcagtctgatgctccatgttcttctgattctggttctaagttttcgaaaactaaggagggatcggaaggcgatgatgccaaaaatgaaactgggtaaagcgctgagccatcagtggaaccaactgtttttcctgacaatgcatatacttttcttcatcctgcttctgtaggcactgcagttaagctttttctttcttttctcattttgttcttgtaacgttttgtccctttcttgcaaataaagagatacatttttgttcaaatatcgtttgagttttactttcatttgaatatccatgcaagcctttaacttttgcatttgctcaagcattctgcgcatgttgttcaattcacactttactatacatagtctcggatgccttttcttcgaagaatttaggttccgctttttatcccttttatgtgagggtttttatgaatttttgtgcaagtttccctttaacatgagggttcctatgaatatttgcgcaagatttctttttgcatctttttcatatgcggcttcgggtatatttttctccgatggcattttggatttcgggcattgattcttccgaaaccaaccctttaacgtgagggttttataagagagggacctcttatgtttacggtgatcttgaagaggacgtctcatgttaattatagcactaacatttgaagcacttgtttaactttcaaatgacaaaattagctcatcgttcaaacaagaaacaagataaaaaaaggatttaattttattccctctattttcataaatcacataagcattttgctatgcagaaaataaattgtcattacttgtggctatcttgtataacttatttctacagggctggctgcgtagtccccggtcccgatgatgcattttgtttctggatttttgttccaggttgacgtggcagtcattgttgttgtatcctcatatcactccccatagtgttcgaatgcgaataatacgaattgaaacactggaagtcttgtatctccgagtgtctcgccaatcaattgctaagtaattcttcactcggcaacatatcttgtttccccttaggaatccatgttatcgagctaaagaatacctaatagtcttatggcgctttatgcccgtgaatatttgggtaacctctgttcggtagcaaacttaacttcccgatgggaatgttctatcgaactaaagattacctaatcgtccccgagtggaagcttgttcatttgtcttgctataaaaggtcttattgctgatgtcttcgtagtatgttttttcctgtttgagcatcgttcatcaacaataatatcttttgaggtgtgctatattctagttgctggtcgattcatcccattctggttctccaactcgtacgaacctttccaagtgacaattgaaatccggtagggaccttcccatgttggacctagctttcccgtgttgagttcccgtgtattctgtgttagtttcctaagaaccaagtctcctactttgaaaaaatggaagttggatctttgattgtgatatcactcaatcctctacttttgatctgccattctcatatgcgccaagtctctgtgtcccttgagcagttctaagttgattagcattgtttcgttattcgattctttatttatttgagaatatctcaaaatgggttcgcccacttcaaccgggattagggcttcagcaccgtacatgaggagaaaataagtttctcatgtacttgatttagtcattcttcggtaggcccatagaactccaggcaactctttgggccatttgccttttgctgtttccaaccttttcttgaggttttgaatgatcactttgtttgtcgactccgcttgaccgtttacgctcagatgataaggcgaagatgtgattctctttatttttaagttttcaaggaactttgtaacttttgcaccgataaattatggtacattgtcgcatgctatctgttttggatttccaaacctgtaaattatattttcccagaggaaatcgaccactttgcgttctctgatcttctgataagaacctgcttccatccattttgaaaaataatcagtcaaaattaaaagaaaccttacctttctgggagctggtggcagcggtgcgccgatgtccatccctcattgcatgaacgaccatggggacaaaaccgaatctaagggtcctaccggtttatgtactagtgatgcatagcgttgacatttatcacattttcatacgaaatctttggcgtcctgctccatgcgaggccaataatatcttgcccataccaatttcatcaccaaagactctgcgcctgagtgattgccgcatatcctttcatggatttctctcatgacgtaatcatcttctgatgctcctacacaccaggtcggcgggccttggaaagaatttttatacaattggcctttcctgaagctataacgtgcaaccttggtgcgtatcacccgtgatgctttgggatcgtcgggcaactttccgtgctcgaggtaattgattatttcatttctacagtcccagaccagactagccaaatttacctcatagtaaccacccgaatcaaggactaagctcatcagttgtaccaccattccggactccggtccctttatttccgttagtgaatctaagtttgctaatgtatccgcttctgcattatcctctctcgggatatgagtgattgaccactcacggaatcgtggcaaaagagcctggacctttaccacgtatcgttgcatatattcctctttggtatcaaagatcccataaacctggtttactaccaactgtgggtcatatttgattttgttaccctcggaatcaagtccccaagcaaatcagagccctgcaatcaaggctccatactcttcttcattgttagttaaagagatcgtgctaatggcttgccttaaggttccccccgaaggcgtgattaaaactattccgagctcggacccttttactttcgaggctccatccgtaaagaaggtccaatctcctgatgtcgattccgacaccattactgcctccttggttgccagaggcagcaatcctggactaaaatcggccacgaagtcagccaaaacttgtgacttaattgtactcctcagtttatattcaatgacgaattcactcatttcgacggcacatttggtcaatctgtcagagagctcattttataaaggatgttccgcaaagggaaagtagtcaccacagctattcggtggcattgaaaatagggcctcagtttccgaggtacgactactagagctaaggatagttttttccaatgtaggtagtgagtttctgctcccgttaaaattttgctaacttattaaataggaaactgcgtaccttcatccttccagactaaaaccgcacttaccgcaacttctgaaatcgtgagatagactagaaatgtttcaccttcttttggtttcgagagcaatgaagggcttgataagtacttcttcaggtccgtcaaagcatgctagcactccggcgtccattcgaaattattcctctatttgcgcaatgtaaataagcgataacacttttccgatgactgggaaatgaacctactcaaagctgctaaccttcttgtgagtctttcaccacataagtcagttgcccataataacatcctccgaccataatagctgaaatttcacgaatttggtgcccacaatacgcctcatggcgcatataagtcttgttccaactctcgaaatactgccacaacggaggagatacatagaaactaatatccacctaccgaatcaacacatcatggagtttctcctcctgacaagaaccattacctcattctgaattgaataatgatatttgctcttaaatatacgttatataaatctgattgcactaatttcaagtccaataatctcgtctcaccccgtacaaattgctcaggcaatgagtcacctcaaacactgaccaagatcttatgcaacaccatcaaagcgccaacaagctaccattcgaatataactcataaggaagaacgaaccctgacagggaattaccagcctgcgtaacaaataaaatagtcgaatagatgctatgaacctacctcagggatgaaaaagcaaggcgcacaaaataagtgcaaggaactatgctcaacatctcattgttgcgacgtgcaacccgatctatcatgacactgttgcggcgtgcaacccgattcatataacattctcgtagcggtgtgccacccagtccagacaatgtacctgtagcggcgcgccactcgatctgcacataacattaagaagaaaacacacatatcaagccgtaacacttatacttagaaaatgcccgaatatggaccacaagcacgccaagtgcataatataaattatggggagacggataatgccatacgctatgaaacctaagcacagctaaggtgcaatggtgacctgcatctcgagagccacctgctcacataacaccacaagctacacgggacctcaacatgtgtgcgaataatgaagccacctcacaacccacatggcacaatagagatttacatggaatagctgacaacagaaataacatccaatgcccgacgactcccccctgagaaatgctattgcgaacgaacacatccgacctgacgtagagcacacactcacactagacccaccaacggacctcacaccgattctgatcataccatactaggtcaataactttccaaagatccacaatggccctattcatgatatataagaacaactgtcacatccgaaacaaactcgcacggtccacagtccgaggaacaggacgcctctcaggcataaactctcgcatttgtgatattaccataaccttcatacttgattttaatctttaacaatcaagtgactaacatgccacacttatacaaatctcctcgtggggtacgctctcacgaccttccgctcatatagcaaagtccgcacatccataccaccaaccatactaatttagtaaggcaaatcacaatttacaaatcaatacacaatgcctcttccacataacgtcattctcacgcgacactaagataacacaagcttactctaaaacgtggggataatatttatagtaaattttacaactctagctaattgataataactcttgtgattttattacacgaaagagactaataggctaaaatataaaatatagtactgatggagtagttagttgtaaacttgtaatattttgatctacggtccaagtcacatgaatcattaacctttttcgagttttcattattttaaaaattaataattcctcccaacaaccatgcgctgagactagggtgccactgaatatttaaaaatcgactaaattgaccgaaatgtaccgtactgaatcgatttttaatttttttataataaaatcgtaggttcttatataaatttacaatcgtaccgataattaagataggtgttttattttataaaaataaagtgaaaaaataccgaaccgtaccgaataaaattatatgtggaaaatatatttatatattaaatttaaaaataataaagcattaaatttttccttgggcagtgaaattatgaaaatggttacaagccaataagtaattaaatcaaaatcttaattctcaatcctattatgctactactactaaaacgaaattatttctggcatatttactagaatgacacaaaatattctagcgattatgagtagcaaaatataatgtattgaatatgtttcctttcgtctgatttagatttatcaatatttaatcttctataggctttatttttgagtctgagcttggttaatatttttctactcgtgtgatttatcttctttttttttgttgtctttttctagtttcttttatgctgatgtagagtagttaatagatctacactctaaccatctttcatatttcttaatatatcaccatttaaacagtaaaattgtctagagagttttgctaagtcgtataaaagtatgtttattattgcattctacttttactaatgacttttacatgacatttaaaataataccgaaaattaaccgaaccgtacagataccgaagagaaaccgacaagattgagacggtttcgaaaagtttaattttggttatacatgatagaataaccgaaaaattagtatggtatgcattttataaaataaccgtccgaaccgaaccattgacactcttacttaagacaatacagatgaaataatactttatagttctataattaattagcaataaacttcctttaattattctaatccggatcatttcaaaagatcttcaataaaataattttacttgtttaatgtataagaaaatagtccgccggagaaaagaagtaatagcaattcacagcatatacaagctgataagggtgttctactcgttgaagtgtctcaaaatttaaacctttattttaggaaacggccaaatataaccctgtagtattaaaaggccaaatacataaacagttcttttaagttgtccatgtgctatggttttttaaagtattatttgattatcaaattattttcgcccacattatttatatatatatatatatatatatatatatatatatatatatatatatatattatcctgaaaatattaacatacctttttctctacaagtttggaagtggtgacaaagccaaaatgtttccataagcaggcaaactaattttattcaacatcttttggaataattcggattcgggcttttgtatatttattgggcgcaaaaaaaaaatgaaatgcattttgttgatttacttaaagaagtattatgccatttgtgtttgctgtcttatacgtctttacgaatggttactcgtctttgggataattagtcattaaagttatgtaatttttttgtctctaaaaaaccactcaattttatatagttcatttaaatgaacattttttctggattatatgctttccagtaaaatttagtgacatgataaaaattaatttaaaaagaagtcattaaaatagtaatttaaaagctaaaatattttaaaacacaacccatccatttattcagtatacatgaccggtcccacaattgcagtttcacgaggaaagggaccaccacgtgttgggaacagtaaagataatgaggtgctttaataaataataaataataaataataaataatgtgtttgtctaattatgatataatttatatgtgctgattcatgtcattttttgtagtgatagattacaccggtttaagcgggtctagtgtttgtcaaagttataaaatatataaaataagttaaaattgtttaaaacaatacaaaatcaataagctaagcaatcataactttatttgtttgtcttaaaagttatttatgacgaaaatccacttttttcaggtcaatccaaatggaccatagaagaaagtttacagtgtgactcaccttttcgtaatttcttagctcactcacagccacagttgaagaaatgaaaaattacaactgacttttagctccattataattttaagtgtgtcccatctttttgaccacaagtattataataaaagttgattgatttttagatcagttaagttaataattagaatcgtacgcaattatttgtcctattattgattgttttatatagtgccaaaaactttggaataaaataatctaagttttaaatggatgcatgcaagcatgctacctactctatattttaaacttcttcaagggccccaaagtgtatgtctcttactattccctagttttgtgagagtataaacccggcattcgtgccaatgtcagaagtttttttttcaatatttaaataatgttaagacaaaatttaagtctattaatatttgttataatgcatgattttcaattgaaaatattaagaatggctgtatattatttgaagtttcttgtttatatagatgttggaactgggagctcggtcagagcaagaatatgattttcatgttagaatttttacttatatatgctacattataaacttatttacccttcctaaatagtttatcatttaattacattagtttatacaatttaccatgtaccagaatccaattttaggtataaggaggagccaaatattcctaaatctcttctctatgcggatctccttaatcttcagattctcctcatatccttttcctgtctctcacctaggatcctcatctatggtttattaaaaagttttaaaagatattttctatagaattaagatgtcttagtcgtaactcgcaatttacattttactgctagtttggtttattgttacatgtcattttataatgtatcatattgtattgtactatattgtattgtattatttggtgaatacaacgtttggataaattgtaccgtttgccgtcgtttcatgatgttacgcaccaacaaaatttaacaatacaatataataaaatttaagtaacaatcaaaataaatattttatttaaagtaacaatacgatacaatacaatagagaacaaccatccaaacaagctattagtgttgttcaaactagagtttcttggaaatttatttgaaatttctattgcctatgtaagttactatccatcattcacaacaagcacaatgtattatatacagatttgtacatgtttaccctaaaatacggataacaattaaatttgtaagtggttttaaggatacgtaggttaattcaatacaaatgataaactgcattagattaaacagataagggacgtaataaattgtcaaaccaatcaagaggagtgatcccggacttagtatcagcttaatgaaacgcctgccttcgatcccgggctcacgttattgatgaattgatgaacaaaagtaagaactttgaataacacagaaaataagaatatatttccttgatatgcgtgttacagtatatctaatgaataatctgacccccctttatatagtaggggagccttaccctaagtgcaattccacaaaaggtaaaaatctttcgtttaactaatcaccggttttctgccgatacgtgtcgagattcacactgtgacatccggttggtcacggatatcacgaccctttgttggtcatggtcgattatctggtaatttcctccgagattttttggattcgaaccgatcctggggggtcgtggcctcgatactcccgaggacagacgttttgcccggactccggctctaggggctctttgcctcgattccggtcccttacagtcacgtcttcctcagtttgcttcatcgaaaatcgaagcatctcatgggatcggttttactcgtacacagatagtcccctcatttttcggagagtaggtttacgaaaacgacgaaaaatgatatgtgcacttcgattccttcttcaatacgacgtgacaaaaacgataaagaatccaaaatgtcccgtcagtcgcatcaatatgactttaaatgcgggttgtccctggatgtgaaacgacgtgaagcctctataaatattcccctccttcgttcactttttaccttttgatcaagattctactttcgagtcttcaggatattactgcccttcttcatactctaacatttttacctccgttcttcgagattcctccgtatattgcaagcttctacttattttctatccaaacccgcgcacttgactttctcagtaaaatttttaccttttatctcccaccttttcttcatattttgaaaactttttccagatatcattggctaaaacttccaaaattgttccccaaaaagttgcttcttcttcttcacaaccgatcaccgaagtcgaagagaccacttccgatgtggtcatcctcgagagaagcactccgggcgtggctaccaatgagccagatcccgagcctcccttgaaaatgttcgtctcgggagggtgcttgatcgcggatgattttaaggttgaaaagccctcgtcggtgtagggctggtgtaaggcggtatctaggtacatatgcttcatcacagaagaggtccttcatgcaattctaaagaattgtgtctgggcggataaagacatagtaatccccaggcccgaggacgctattactactcatgtggaggggtatctgagtttttacacttatctcttcacactaggcctagtggatccggttattctggacttctgtaaaaggtttaaagtatgcctcggtcagatccacccctcgctgtggaggatcgtaatcctccttcgatactttgtgaacaaaatcgacttctatcggttcaccatcaatcatctactccatctgtacagtccccgaatctttcgatggggactgataaagctcgtacgccgtgctagcaaatcctcattctcaagcatcgatgaggaccgggatcggggctggtagagacgctttgtccgggtgaggaccacagacttgatccctgccaagtttagaccattccccgagaagtggaatgtatcacgtaagcataactttcctttaaatgtcaattttatattcatcttctttttcctcaccagtatttgcggtggtgcagctgttgctcgagtcccaaacgccattcctcagctcaaggagtggatcgagggcatttgttcacagatgccttattctaagcgcacatggcacgaactctcgaagggtcgttgggaggcccatactcacggtaagctctctttcccaaataagtaacattatgccctttttagcaccatattctcattccctctcttttctttttgcaggcttgcctaagctcagagaagaaaaagccaagaagaaggttggcccgtaagacaaaggatagttctagctcccgagcacccaactcgaactcactttttcggctcagggacgagcccgaagaaggtgatatgtttgtggttggtgatccgacctcccccgaagagcgggcgacatccgagggggaaaccacgagggctaatccccctcagtttcaggaaaccgatgtagagatgagggctgagacctctcgagatgccggatccggtctgcccggtgtcatagatattccagggtcgccttcatttaccaaatccatgtttgacgaaccccaagcggtgaaggagcgatccaacgaaagggcccatagagcagatgatcccattcgttctattttttaaggtgtggattcaaccgctctagaagacttctccgggttgggtgacttggaggtgccgaggaaagacctatcttcagaggtcgacgagctgaacccgagctcaaaattaatcaaccagttaccggctccgagcattgatcccagccgtaagaggccaataatcatcaccgtccggagaatgcccgggttctttctacacccgtttgagttgtgagctacctccggtgcctggtaatcgaagaagaccaagcgaaaatgaacgaggtggaagtatcgtgattgctcaacgaagcgcaggaagtgctgaaccgggtaaggcatcattacgttcttccatcttctgacttagttttatttatatttctcacgtcttctctgttttatatttttgctgacctcggtactccatcatgaaagttttctctggtaccgggctgaggttaatcagctcgaggctgaggccagggagctcttcgagaagagggacacgtatacgcttctcagcgagcaacacgaagaagttgtcaagagtctccaggctgagtttgatgtagctcagaaggagtatgccgacctggtggaacatatgaagattttcgaagttagtgatgatgacttagccatggaaactaacgatcaagcctcgcaggtccagcagaagtttgaccagatcgaccagctccgggctgaagtgaaagaggtccaggccatggctgatgtctggaaggaacaaaatgtaatagtcttaagggacaaaatatgtatctgcaaggtagaaacattatttcattcttgtgcgtaatatacaagattgtaagtgtgtacaaacttcgtgttatggcttaggtggtctacgcgggcacgttcatttgaccgtttggctcttataataaatcttattcactgagcctagactattcaagaacaaagtttcattcctttctaaaatcattacccgagggtgatgacccctagtattcgaggtcaatcgctgagaggtctcggatactgttgatgtgaccattgactctggtttataatcggtcttggattctaagttagcatgatccactaatgcctcgttaaaaaccttgctagaaaactcatttgggacaaaactgattcaagaaaaaagagtgcaacatgtgctttcaggcctaacaactacatcatcctttggatatttcctccaagtgttagtccaattcgcaatataggttaaaaaaaaaagaatgaatggagtcgtaccttagcaatagtatcattttaagtaggttatgttccagttgttcagtagctgctcatcattccctgcttcgagtttgtacaaacctttaccggtaatctcgataattcaatatgggccttccgaattcggtcccatcttcccttcatttgggttccagatgtttggtgtcacctttcttaacaccaagtccctgatattaaagtgtcagaggttggctctccggttgtaatacctttcgatccgttgtttctgggcggtcagcagaacgagggcgtcctcgcgtctctcatccaatagttctagtctcgtgctcatggcctcaccgtttgactcttcggtcgtatatcataacctgatactcggttctcctacctcgactgttattaaagcttcggcaccgtagacgaacgaaaacagggtggccccgatactagacattgaggtcgtatggtatgcctatagggcttcgggaaaaaatttccttctattttcctttggcgtcagtcaatctcttcttaaggttttagagtatggtcttgtttgagactccatctagccgttcccactagaatgatagggtgttggcaggatccttttgatcttatggtcctcaaaaagttttcttaccttactgccgatgaactgcttcccgttgtcacatacgatctcagccgacattccaaaccaacatattatatggtcccaaataaaatcaatgacttctttttctatgactttctcaaatgcctgagcttcaacaaattagaaaaatagtcattcataaataatataaattgagccttaccgggttcccatggcaggggaccgatgatatccatcccccatttcatgaatggccaaggtgacaagaccgaatgcagtagctccccgggctgatggatcatcgatgcgtgcctgtgacaaccatcgcatttccgtacgaactccttcacatctttatccatgtcgatccagtaatagccggctctggttatcttaccaaccaacgattcggcccccgaatggttcacgcatgtgcctctgtgaacttccctcaaaaagtattcggtgtctcccagtcccagacatatggagagtgggccatcgaacgttcttctgaacagggtgttatcctcggacaggctgaatttgtcgtcattcatgcgcagagctctcgattctttaggatccgatggcagcttctcggtcttcaggtaatctgtacacttgtttctcccatcccaggttaagcttgtcgagtttatctcggggtggccttcttccactacggctttcatgagttgtacgaccgttcccgagctgaattcattgtcatcaaatgacgaccccaagttagctagcgcatcgacttcactgttttgatctcggggtacatgttgctaggtccactccttgaatcaatatagtattgcctgtagtttatccaggtatcttcgcattcgttcctatttcacatcgaacgacacattgacttgatttaccaccaggagggaatcgcatttaacttcgatcaccttggaccccctggcttttacccaaattgagacctgtaattatggcctcatactcggcctcattgctagtcaatttcacagttctaatagattgcctaactacgttactcgtgggtgtcttcaacatgatgccgaggccggacccctttgcgttcgaatcaccatccataaagagggtccagatccccgaggaggtcctcgaggataacaataatcccctttcgacttcgagtattaaggcaggcgtgaaatcggctacgaagtctgccaaaatttgagatttgattgcgattcgggttcgataatcaatatcgtacccactaatttccatgaccaatttggccaatcatagcgagagctcgggtttgtgcattatgttcctcaatgggtaagtagtcaagacacatatgggatggtattgaaaatatggccttaacttcatggagacgcttagcaaggcgagcaccaatttctctaagttggggataccttgtttcggccttgcctagtgtcctgctaacataatatatagggaattgcgtaccttcttctttccggactaagactccacttaccgttatcttggataccactaagtataggtacaactgctcgtctgccatcggagtatgataaaggcagacttgaaaggtaccgtttgagttattccaaagcttgctggcattctgggatccacgagaagttattcttcttcttcaataatgagaagaaccgatggatcttatcagaggaccttgaaatgaatctatccaaggtggctatgtacccggttagtctttgaacgaccttgacattgtccaccacggtgatgtcttctatggccttgatcttgtcgggattgatctcaattccctggttggacaccatgaatccaaggaacttcccggacctgactccgaatgccgcatttctccaggttcaacttcatattatatttcttcaatatgttgaaagtttcctacaaatgtttcaaatggtcctctactcgcagggacttaactaacatgtcgtcaatgtaaacctccattgattttcctattttttcttcgaacatccgatttactaggcgttagtaagtggcaccggtgttttttagtccgaatggcattacgttataacaatagttttcatatttagtgatgaagaaagtcttttcctggtcgcccggatccatccggatctggttgtacccggaataggcatcgagaaagttgagtatctcatggccggccgtcgcatcaatcatacgatcgatgttaggaaaggaaaagttcccttagggcatgccttgttcaagtcttagtagtctacacatattctttccggtagtgtttaccgacagggttatctcctctttagtggtctcacatgccatgttaaacccgtttaaaattcaggttgcaggcacaatttggtcttgtagtcccagctgttccatgaccctcaatttgatgatattggccgagctacctggatcaattaacacacgcttaactcgagatttatttatgagtacaaatattactagtgcatcattgtgtggttgcatgatgccttcaacatcctcatcattgaatgatacggttctcttcggtacataatctcgagtccatttttctcttgtaatggacactttagtgcgctttaacatcggccctgggggacgtcaaccacaccaatgatcatgatgatgacgtgctgaggctcctcctgattgatctgcttgttggagtctctattcttgaagtgatttttggctcgatcactcaaaaattctcgaaggtgtccgctattgaataaccgagtacttcttctctcagttgtcggcaatcttcggttatgtgaccatgagggccatgatatttacacattaggttggggcccctttggacaggatcagattgtaacagtcgaggccacttagtattttttatgcgtccgatggctgataggatgccgatagcatcgacgttgaagttgtactccgataaccttggtgtttcctaagatccgatgggtctgtcaaaaccgtttttgttcatgagtcctcggttagtatgacctcgatcgcttcttctttcacttctcacagtgttgcatccggacccattaccccttcgatctttattgtatgcttgataacggtctctgttcgatctcgtttcatgatcgacggaccttttggatctgtcactagtcctgacgggataaacgaacccggaaagggccccgagctgatcattttttaccctgattttagattggtaccggttatgggcttcgacccaacttaccgtcgggtattctatcaaattttgcttcaactgatgtgaagcctatgagctttagggattgagtccttgggtgaagtcctgagcggcccaattatctgcgacaggagggaaatccatccgttccatttgaaaccttgatatgaattccctcaccatctcgttatctctttgctttaccttgaaaaggtttgatttcctggtctcgaccttgatggccttggcgtgcgcttttacaaaggcatctgcaagcatagcaaacgagtcaatagaattatggggtgagttgtgataccatatcataactcctttcaacaagatctctccgaacttttttagtagaacagattcgatttcattatcttccaaatcatttcccttgatggtgcacagataagaggtcacatgttcgtttggatcagttgtcccattatacttcggaatttcgggcatacgaaacttctttgggatcgacttcagatatgcgctcggagggaaaggcttttggacaattcttttggaatccaggcccttcagtatcgatggtgctccagatatttggttgaccctggagttatatgtctccacttttttgtcgttggctttgattttctcccgattccacccattttgtcagttcctcaagaatcattattatctcagggttggtccagggttctatttcacccggcctttctgtggccgatttatatctgcgggcgctttcccgggacgatttaggctagactctaatgggggatcgactttggttctgcaactgtgatgtcactgcctgttgagcctgtaacatttcgaagatcacacgcaagttgattccatcaccttcgccatcgtgtgtactccgggatatcgaccgggctcccccgcgaatgctattttcggggtcagtaggcaaatttgcttcgatagagacatgtgagttagcatcgatcaaatcagcgactaggactccgttggggtcagcaaggggcaccttgttgctgggtaccacgttgttgtttcgccatggttgccggactcatcatccatgttcaaatggggagattgggagttcgacatttttaatttgacctgaaattaaaagctcaaagaactagtataaagtagagtatgttatcgaaatttgtatcaaattgccactattattcttagctccacggtgggcgccaaactgtttaccctaaaaaaaggaataataattaaatttgtaagtaattttaaggctacatggaataattcaatacaaatgataaactgcattagattaaacagataaaggatataataaattttcaaaccaatcaagatgagtgatcccgcacttagtaacagtttaataaaatgcttgtcttcgatcccgggctcacgttgttgatgaattgatgaacaaaagtaagaactttgaattatagcgaaaataagaatatattaccgtgatatacgtgttacagtatatctaataaataatccgacccccctttatatagtaggtgagtcttaccctaagtgcaattctacaaaaggtaaaaatctttcgtttatctaatcaccgaatttctgccgatacgtgccgagattcacgtcgtgacatccgactcgtcacagatatcacgaccttttgttggtcatgcttgattatcttgtaatgccctctgagattttttgaattcaaaccgatcttaggggtcgtggcctcgatactcccgagggtagacgttttgcctgaaccccgactcaagggactccttgcctcgattccggtccttacagtcacgtctcttcctatgtttacttcattgaaatcgaagcgtcccatgggctcggtttcacccgtacacagtacccatctctatgtcccacaaaaatcccaagagttcttcttcaccttcgtctccacattattgattgaatatataattaactctataattgatactaaacaaaaatttaaaataaaaaactaaattggactgcgaagacataaatttaaactccactgacagtcattcaaaagtttcgaagctttgaattcgaaaattgaattttaggaaattgttatttgtttggattggatgttgttgaaaatgattgggaatatcttttggagtttatatctcaattttgggagaatctgatgaagattcaaggtggttttggtaagaaatttcagattgaaccccgaagaagacattaacaaattatatatatattttgtatgtcgggtatagagacgacatacaaaatatacataactaacataattatatacacgttatatataaattatatgttaattataaaatttgactgcatttttgtacaaaatattatatttaagttgtagataacttatagattttgactgaatttgtatatattttgtaaaaaactttaattactttctagtaaataattttatgatttcttatatatatatatacgaaaaagtctgtttgatgtttagtgataatcgtttctcatttgcatcaaagtgttaaaaagaaaagagttttgagttgtggagaaaagtgataagtaaagtgggaggaagcctgtgaattgaatcatgggcttgtctagcccaattcccccaaaagggttgagccagcctagaagcagaactaggggcttagcccgtcatttagaatgagaaattagcttaaatagcacggcacttgcgttgctagtggatggaataaattgacaattatttccttcaatttttgttctttttatttattctggagagttttaaacatatggagggaaaaagattctggaagtatagttcaaataaagataataggagcatacaaaatttgaagagggtaaacgttaaacttgggtgctagctggtccaaatttacggctttttgaacggtccaaatgatagctggctggtaaatcccaaattaaaaatatactactactagttattagaaatgggtaataatcatttacatcctccaagtttactctaaaaataaaactcatcctctaattttaaacgattctcattttcatctttttatcctacgcaatgtctattttaccctttgacattttcaactccccatatacttaataccctttttatattatctagatatttcttaatgcaggtatctattcataatttaaataatattttatcttatcacataatttaatttaagttcactgaagttataaataaaataattatattatgaatttattaaaaaatatattgctactttttttttatattattattattattattattttaatattatgtatattaaaatgcatagaatgtatgtcggtgtgtgtgtgatgttccactatttttattattttctatgagtatatagtttttgatttttgattgttattaataaattttttctacagtataattaaagttcatgtaaagtgtaaatagataatttttgtaaatttattataaaatttacctctatttttcgatcattaatttttgttaccggcatcgtataatttataaaatttttactctcatttattcttgattttgtaaacatattgagttttgattgttattaataaaattactgataggaataagttatttattgtaatttttatattttctcatttatttcactattgaacgtcattaacttatatgcttgattactacttctcacttttttgggtttcgaaaaagtttctttgatttgtctataggtaggtcgttaacataaattaaaataaaaaaaatatcattatattaaagaataaaaataagagataaaaattgtagagggtaaaataggtattttaagaagtcacctttgatatgaggagcagaatgatatttgttcaaagttggaggatgagtttgatttttaaagaaaacttgggggacgtaattaaatgatttttaccctattagaaataaagaaaagtagaagctgaactcttggatacaagtcttagcttggtttggtcaaatatatttggattccatgaattcaaattagacattgagaagaccacactttattgatttcatcagctgttctctacgtattcggcttcatttctcagcatgacctcaatccctagctgatccaatgaaccatgcatttttcaaaagagagtttaactctaatattgattactaattgaaaacgtataagataggttatctgctccaataaataaaaattaataatatacagaaactatatactgttggtttataattacgttaaatccgatacttttatttatgtaccaatatacaccttattcatttcaaatagaaaatagaacatcgtcactttcttcttcttcttctacttcttcgtgcatggattttctccattatctctccaatccaacctttctttccgcaaatctcacctaatcgtaaacaaaagaagaaatattataattaaataaaatcgaaaaactcagcaccagatacgcgactaagacgtgatcactgatcagttaaggtattggtattcagttcatttcattatataaattatgtcaattcatcattggaggctaagaagagggaacccaatcaccaaagttttgaggtaattaggtctaagctactaattaattaacgtgtcaaagagcctataagaaaaacacgcgtgttggaagggttgggttgatccagtccaattccaaatatagtagtaatactctagcttcaatgatcgttacgttctagtcgcacatttagtagttgtgatcttaataaatcctggatagtaccaactttaccttttgaaacgtgacacagagaaccaaagcctcaacctgtttgaaaggacgatgctatatctaaaatgtaaaatataatttagctcacgtagaagaaaaaaagaagaagaatatctcaaattcttcaataaataaaagagaaaagcataaagccaaaactgatgtcaaaccactactagaaatccgggaaaaaccgaccaaagtcggtcggtaatggccaataaccgtccaaaacgcgatcattaatgtgtgatcggtattttgaaggtcggaagagcatatcgaccaaagacggtcggaaattaccgatcaacattggtcggtatgctctacacgaccatctgataatttaattgacttaccgaccaacattggtcggaatgttattttaataatttaattttaccgaccaaacttgatcagtattttaaatttattaattttgcttatcgaccaacgttggtcagtattggaaaataattttttttattaattaaaatttaacaataccgaccaacattaatcggtaaactggacagtgcagacaacttatcgaccaaagttggtcggtaatgttgaatttctgggaattcaatgtgcattaagtaaccaacattggtcggtaatttggaattaattttttttattagttaccaaccaaggttggtcggttttatgggattaattttggcataaaatgcttgttttggtagctaacaccacctgccaaataaaaacagcatactaatacccccaattcacatataataactatcaattcaccacatacaacccctaattcaccacaaatccaaccaaacatccaacaacaacaacaacaacaaccaaacatccaacaacaacaacaacaaccaaacatccaattaacactttaaaactaacaaattaaagttcaattaaacatcacaatccaaaaccaagcaaaaactaagtaattacaannnnnnnnnnnnnnnnnnnnnnnnnnnnnnnnnnnnnnnnnnnnnnnnnnnnnnnnnnnnnnnnnnnnnnnnnnnnnnnnnnnnnnnnnnnnnnnnnnnnnnnnnnnnnnnnnnnnnnnnnnnnnnnnnnnnnnnnnnnnnnnnnnnnnnnnnnnnnnnnnnnnnnnnnnnnnnnnnnnnnnnnnnnnnnnnnnnnnnnnnnnnnnnnnnnnnnnnnnnnnnnnnnnnnnnnnnnnnnnnnnnnnnnnnnnnnnnnnnnnnnnnnnnnnnnnnnnnnnnnnnnnnnnnnnnnnnnnnnnnnnnnnnnnnnnnnnnnnnnnnnnnnnnnnnnnnnnnnnnnnnnnnnnnnnnnnnnnnnnnnnnnnnnnnnnnnnnnnnnnnnnnnnnnnnnnnnnnnnnnnnnnnnnnnnnnnnnnnnnnnnnnnnnnnnnnnnnnnnnnnnnnnnnnnnnnnnnnnnnnnnnnnnnnnnnnnnnnnnnnnnnnnnnnnnnnnnnnnnnnnnnnnnnnnnnnnnnnnnnnnnnnnnnnnnnnnnnnnnnnnnnnnnnnnnnnnnnnnnnnnnnnnnnnnnnnnnnnnnnnnnnnnnnnnnnnnnnnnnnnnnnnnnnnnnnnnnnnnnnnnnnnnnnnnnnnnnnnnnnnnnnnnnnnnnnnnnnnnnnnnnnnnnnnnnnnnnnnnnnnnnnnnnnnnnnnnnnnnnnnnnnnnnnnnnnnnnnnnnnnnnnnnnnnnnnnnnnnnnnnnnnnnnnnnnnnnnnnnnnnnnnnnnnnnnnnnnnnnnnnnnnnnnnnnnnnnnnnnnnnnnnnnnnnnnnnnnnnnnnnnnnnnnnnnnnnnnnnnnnnnnnnnnnnnnnnnnnnnnnnnnnnnnnnnnnnnnnnnnnnnnnnnnnnnnnnnnnnnnnnnnnnnnnnnnnnnnnnnnnnnnnnnnnnnnnnnnnnnnnnnnnnnnnnnnnnnnnnnnnnnnnnnnnnnnnnnnnnnnnnnnnnnnnnnnnnnnnnnnnnnnnnnnnnnnnnnnnnnnnnnnnnnnnnnnnnnnnnnnnnnnnnnnncacgaggtattttctacaacatcatcaccatctcatgaactttcatctataagacggtatagagaacggtcttatagagtatgggaagaacgatcacgggtcatacgggaggaacgaccacgtggaggccgagcctctagcgatgactcacgagaccggggcaacggaaaagctccagtagaaaggatagttctaatctgagcttgcataccaaggaattgagcatctctaagactttctctttccttggccgcttctagctcagtgtaagctttgtgtgatgacccaatatgtcatctttaaatttaacattcaattatgtgctttcagacctcgaatagcataatttagcattcctcgacttgcgtgcacagtccgtaaattttttcgaaaagtttttatgtgaaaaatagattaaaatattaaatagtgctttgatttggtgtccgattcatatttttaggtattattttggtgttttgatcacgcgagtgagttcatataaagtttatggacttgtgtgcatatatggtttggagccccgagggctcaggtaagtttcggatagcctacagaccttttgaactttggaaaaatctggtttttgagcttcagctgtcacatggtgcattgtgctttgcaatcgcgaagtcattcccgcgatcgtgaagagttaattgtgagctatgacttttactcttcgcgttcgcgaagagagacacgcgatcgtggaaggttggctccaagtgcatcgcgaacgcgtagtgttgatcgattccgcaaagaaggaatggggaagaagctggggaacacaatttgtgcttcgcgaacgctggagggcatttgtgattgtgtaaggttaagaaatcgttctgcgcgttcgcgtgagtgttgccgctttcgcgtagagttaaattctgggacagtctaatttgtgcttcgcgattgcgaggaattgtctgcgatcatgaagagtaaaatagaactgggcagaaatatttctacacgttcgcgaatggatttccgcgatcatgatgaagaaatccatggacaacagaacttaagttctggaaatgggatttcgtcccatttttcattatccacgatttagagctcggtttgggagattttcagaggagttttcacaaattcgaactggataagtgttccttatcctatattggttatatttcattaatccaagtatatattcatcatttatttcggatttagatggaagaaattggattttttataaaatcttccaaaaatataaaatgaatatttgaaaggcaatcctaagtcggaattcgataattttagtatggttgaactcatatcaaaacgggtgtccgaattctgtaatttttttgtcgggttccaaaaagtgggccccacattgacttttgttgacttttcgaaaatgacttaaattaagttcctttcgaatcgtgaataatttttaatgcttaaattgaattgttggtaaataattggctaggtttgattggtttggaggataattcaataggaaaagccatggtcgagtgatcacttgaaatttgccaaaataaggtaagtgtcgtggttaaccttgacttgagagaaataactgttgaattgacttcagttatgatttaactgttttacctctattcctgttattattattattattattattattattattattattattattattattattattattattattattattannnnnnnnnnnnnnnnnnnnnnnnnnnnnnnnnnnnnnnnnnnnnnnnnnnnnnnnnnnnnnnnnnnnnnnnnnnnnnnnnnnnnnnnnnnnnnnnnnnnnnnnnnnnnnnnnnnnnnnnnnnnnnnnnnnnnnnnnnnnnnnnnnnnnnnnnnnnnnnnnnnnnnnnnnnnnnnnnnnnnnnnnnnnnnnnnnnnnnnnnnnnnnnnnnnnnnnnnnnnnnnnnnnnnnnnnnnnnnnnnnnnnnnnnnnnnnnnnnnnnnnnnnnnnnnnnnnnnnnnnnnnnnnnnnnnnnnnnnnnnnnnnnnnnnnnnnnnnnnnnnnnnnnnnnnnnnnnnnnnnnnnnnnnnnnnnnnnnnnnnnnnnnnnnnnnnnnnnnnnnnnnnnnnnnnnnnnnnnnnnnnnnnnnnnnnnnnnnnnnnnnnnnnnnnnnnnnnnnnnnnnnnnnnnnnnnnnnnnnnnnnnnnnnnnnnnnnnnnnnnnnnnnnnnnnnnnnnnnnnnnnnnnnnnnnnnnnnnnnnnnnnnnnnnnnnnnnnnnnnnnnnnnnnnnnnnnnnnnnnnnnnnnnnnnnnnnnnnnnnnnnnnnnnnnnnnnnnnnnnnnnnnnnnnnnnnnnnnnnnnnnnnnnnnnnnnnnnnnnnnnnnnnnnnnnnnnnnnnnnnnnnnnnnnnnnnnnnnnnnnnnnnnnnnnnnnnnnnnnnnnnnnnnnnnnnnnnnnnnnnnnnnnnnnnnnnnnnnnnnnnnnnnnnnnnnnnnnnnnnnnnnnnnnnnnnnnnnnnnnnnnnnnnnnnnnnnnnnnnnnnnnnnnnnnnnnnnnnnnnnnnnnnnnnnnnnnnnnnnnnnnnnnnnnnnnnnnnnnnnnnnnnnnnnnnnnnnnnnnnnnnnnnnnnnnnnnnnnnnnnnnnnnnnnnnnnnnnnnnnnnnnnnnnnnnnnnnnnnnnnnnnnnnnnnnnnnnnnnnnnnnnnnnnnnnnnnnnnnnnnnnnnnnnnnnnnnnnnnnnnnnnnnnnnnnnnnnnnnnnnnnnnnnnnnnnnnnnnnnnnnnnnnnnnnnnnnnnnnnnnnnnnnnnnnnnnnnnnnnnnnnnnnnnnnnnnnnnnnnnnnnnnnnnnnnnnnnnnnnnnnnnnnnnnnnnnnnnnnnnnnnnnnnnnnnnnnnnnnnnnnnnnnnnnnnnnnnnnnnnnnnnnnnnnnnnnnnnnnnnnnnnnnnnnnnnnnnnnnnnnnnnnnnnnnnnnnnnnnnnnnnnnnnnnnnnnnnnnnnnnnnnnnnnnnnnnnnnnnnnnnnnnnnnnnnnnnnnnnnnnnnnnnnnnnnnnnnnnnnnnnnnnnnnnnnnnnnnnnnnnnnnnnnnnnnnnnnnnnnnnnnnnnnnnnnnnnnnnnnnnnnnnnnnnnnnnnnnnnnnnnnnnnnnnnnnnnnnnnnnnnnnnnnnnnnnnnnnnnnnnnnnnnnnnnnnnnnnnnnnnnnnnnnnnnnnnnnnnnnnnnnnnnnnnnnnnnnnnnnnnnnnnnnnnnnnnnnnnnnnnnnnnnnnnnnnnnnnnnnnnnnnnnnnnnnnnnnnnnnnnnnnnnnnnnnnnnnnnnnnnnnnnnnnnnnnnnnnnnnnnnnnnnnnnnnnnnnnnnnnnnnnnnnnnnnnnnnnnnnnnnnnnnnnnnnnnnnnnnnnnnnnnnnnnnnnnnnnnnnnnnnnnnnnnnnnttctgcacttctcgtgcagataccggagttagtcccagtggcgtattatagattttgctcatattcagctatcagatgagacttgaggtatagatgcacgacgttcgcagctctgaagtccccttccactttattttagttctgtgcttacttttagatagttttatttttattcagacccttgtttgtattattttagaagcccgtgcacttgtgactccagttctaagatggtatttagacatcgttattattttggttgttcatttaaattttagatattattatggtttttggtctctttactatttaattaagatgaattgttaaaaatgattaaaattattgtaacgttggcttgcctagtaagtgaaatgttaggcgccttcacggtcccgaaggtgggaatttcgggtcgtgacaagttggtatcagagcactaggttacttaggtcttatgagtcacgagcaagcttagtagagtctgaaggatcgatacagagatgtttgtacttatctctcagaggctttgaagtttaggaataatatcacttctttcttattctgtcatgcaattttattctatcatcgatgattgaatcattctattcttagtctctcgcagatggtgagaacacgtaatacatctactgacggacagtgaccagagcccctggtggcaactatgaccaggggtagaggccgaggccgaggtcgaggtcgtgctagaggctgaggtagaggcagaggtagggctcagtctagagctcgggcatcatcacctgttgtagaacctcaggtgaatttgggagcagaggttccaactcagactgtacctgttggaccagttcaggccctaaaaggattcatagctactatagtgctttaggatgctctagtctatttggtgaaccttatggagggcgtggcccagaatggaacatttccagtggcatcgcccgtctcacaggatgggggaggagcaaagactcccactactcccgctccgaagcagatggctccgaagtatcaggctccagcagccccgccagttggggtagttcagccagttattgcggcacatgccggtgataggcacgccatgtcttctgaggccttatttagattggacaagtttactaagctctttccagttcacttcagtggtacaccttctgagggtccacatgattatcttgaccgctttcatgaggtattgcggaacatgggaatagtcgaaagcaacggggtcgattttgctgtgttttagatggctggttctgccaagaggcggtggagagattatgtacttactagaccagcgaattcgcctgcacttacctgggagcagtcctcacaactatttctggagaagtttgttcctattacactgagagaggaatacaacaggcagtttgagtatctccagcatggtagtatgactgttacccagtatgagactcaatttgtggacttagcccgttatgccatcgtcttgcatcctaaggagaaggaaagagtgaggagattcattgatggactcacttatactatcaggcttcagatggccaaggagacatggattgatatttccttccagaccactgtgaatattgctaggcggatcgagttagttcgtgctcaggagagagggctagtgtcagataagaggccccgtcattccggtaatttcagaggcgcctcatctggaggcagggatacttatagtaggggtcatcctcccaggccattttattcaacacttcaggcatctcacggtgcttcagggagtcatggtcctatcagtgcaccaccgctctagattcactacagcggttatccggctcgttcgggtcaggttcatcttcagcagccacaacagcaggatgggtgttatgagtgtgggagcattggtcacatcaggagatattgccccaggttgtcgagcaacagatctcagcaggattctcgtgccatcataccggcaccagttactctgtcacccgcccagccagctaagggtaggggtcagacaactaaaggtgcaggtcaggtcattagaggtggagaccagccagttagaggtcatcccaggggcatagtttagggtggtggggtccaaccccaattttatgcttttccaactaggcctaaggctgagtcattcgatgccgtgatcacatgtattattttagttttccatagagatgcttcagttctatttgatcaaggatctacttattactatatgtcctcttattttgcttcatatctagttgtgcctcgtgattctctgagagcttccgtgtgtgtgtccacactgatgggagattatgttgtggtagatcatgtctattattcatgtgtggttactattgggagtattgagactagcatcgatcttctacttcttgatatggtagattttgatgtcatcttgggtatggattggctgtcaccttatcatactatattggattatcatgccaaaatgatgaccttagccataccggggttgcctcaattagagtggaaagagattcctggccattctactagcagggttatctcttatgtgaaggctcgacgtatggccgagaagggttgtctagcttatttggctcatattcgcgattctaatgcggatgttccttctatggattcaatcccagtagtctgtgagtttctagatgtattttctgcagatttaccagggatgccaccccgacagagatattgacttctgtattgatttgtctccgggaacccaacccatttctattccaccataccgtatggccccgccggagttaaaggaattaaaagaacaattacaagaattgcttgataagggctttgttagacttagtgtctcgccctggggtgcaccagtgttatttgtaaataagaaagatggttcaatgcggatgtgtatagattatcaacagttaaacaaggctactatcaagaacaagtatctgttgccggactcggtatgtgcattacgaattcctagtgatgtcatttgggctgactcggaatgtgcattacaaattccttgtgatgtcatttgggctgacaaatgccctagcaacatttatggatttgaggaatcgagtattcaagccctatttggattcttttgtggttgtattcattgatgatatcttgattactccagcagtcgagaggagcatgagcaacatcttcggattgtgctttagactttgaaatataatcagttatatgccaaatttttgaaatgtgagttttggttagattctgttgcctttttggggcatgtagtatcggctaaaggcataaaagtggattctaagaagattgagacagttcagaattggcctagacctacttcaactacagagatccggagttttctgggtttggtaggttattgtctggtttgtggaggggttttcatccatagcatccacgctgaccaaattgacccagaaaggtgccccattcagatggttagacgagtgtgagttgagctttcagaagcttaagattgctttaactacggtaccagtattggtattatccacaggttcaggatcttatacggtttattgtgatgcatctcgcgttgggcttggtgcaatattgatgcaagatggtagggtgattgcatatgagtcgcggcagttgaaagttcacgagaagaattatcctgttcatgacttagaattggcagccattgttcatgcgttgaagatttggaggcattacctttacagtgtctcgtgtgaggtatttactaatcatcgtagcctacaatatctgttcaaacaaaaagatctcaatttgaggcagagaagatggttagagatgttgaaagactatgatatcaccattttgtatcaccccagaaaggccaatgtggtggccgatgctttgagtagaaaggctgtgagtatggtcaaccttgcgtatattccggttggtgagaggtcgttagctgcagatgttcatactttggccaatcagttcgtgaggttagatatttcagagcccattcgggttctagcttgcacactcgctcagtcttctttatatgaacgtatcagggaatgacaatatgacgatcctcatttgcttgtccttaaggacacggtgcatcacggtggtgccaagcaggttgctgtggggagaagatggagttctgcgaatgtagggtcgtatttgtgtgcctaatgtggatgggcttcgtgaattaattcttgaagaggcccacagttcctggtattctattcatccgggtaccgtcaaaatgtatcaagatttgcgacaacattattggtggaggagaatgaagaaggatatagttgcataggtagctcggtgtctaaattgtcagcaagtcaagtacgagcatcagagacctggtggtttgcttcagaaattagaaattcatgagtggaagtgggagtgtatcactatggattttgttgttgggatcccatggactcagagaaagtacgacgtggtatgggtctttgtggacaggttgaccaagtcagcacacttcattccagtagcggttacctattcttcaaagcgattagcggagatttacatctgcgagattgtccgccttcacggtgtgctcgtgtctatcatttttgatcgaggtatgtagttcacctcacagttcatccggtgttccatgtgtctatgctatggaaatatcatgatgatccatcccatgtgttagatttcagctcagtccaattggacaaggattttacttatgaggaggagccggtagctattctagcccgacaggtccgacaattgaggtctaagagctatccatcagttcgagtacaatggagaggtcagtcaattgaggaagctatttgggagtccgagtcggacatgtggagtagatatccacacctttcaccagctcaggtaattttctaattccgttcgagaacgaacgtttttttagaggcggagaatgtgatgacccaatatgtcatctttaaatttaacattcaattctgtgctccgagacctcaaatagcaccatttatcatttcttgacttgcgtgcgcagtctataattttttcggaaagttgttatgtgaaaaaatggattaaaatataaaatactactttaaaactaacttaagttgacttcggtcaatatttttagcaaacggacccggatcactgttttgatagtttcggtaggtccgtattgtaatttgggacttgggcgtatgaacggaatttaatttggaggtccctagcttgagttatcgtcatttatcgaaaactagaagtttgaaagcttaaagatttcaaagtttgaccgtgaatttgactttatcaatatcgggctcggattgagattcttagagttggaatagatctgttatgtcatttatgacttgtctgtaaaatttggtgccaaacggaagtgatttgacgcgattcggacatccggttgataaaataggaattcttaagcttcattaaattttttatttgatttggtgtccgattcgtagttctaagtgttattttggtattttgattgcgcgagtgagttcgtatgaagtttttggacttgtgtgcatatgtggtttggagactcgagggctcgggtaagtttcggatagcccatagaccttttgaactttggaaaaatatggtttttgagtttcagctgtcacctggtgcattgtgcttcacgatcgcgaagtcattcccgcgatcgcaagagttaattgtgatctatgacttttactcttcgcgttcgcgaagagaggcacgcgatcgcggaaggttggctcccagtgcatcgcgaacgcgtagtgttgatcgcgtccgcaaagaaggaatgaggcagaagatggggaacacaatttgtgcttcacgaacgcaggagggaatttgcgatcgcgtaaggctgagaaatcgttctgcgcattcgcgtgagtgttgccacgttcacgtagagttaaattcctggacaatctaagttgtgcttcgcgatcgcgaggaattgtccgcgatcgcaaagagtaaaatggaactaggcagaaatgtttctacgtgatcgcgaatggatctccgcgatcgcgatgaagaaatccctggacagcagaacttaagttctgaaaatgggatttcgtcccatttttcattattcacgatttagagcttgttttgggagattttcaaaaaagttttcacaaattcgaactcggtaagtgttccttatcctatattggttatatttcataaatccatgtttatattcatcgtttatttcggatttagatggaagaaattggatttttttataaaagcttccaaaaatataaaatgaagatttgaaaggcaatctgatgtcgggattcgataattttagtatggttgaactagtataggaacgggtgtccggattccgtgattttttcgtcggattccgaaaagtgggccccacgtttacttttgttgactttttcgaaaatgacttaaattaagtccctttcgaatcgtgaataatttttaaagattaaattgaattattggtaaataatttgctaggtttgattggtttggagggtaattcgaaaggaaaagccgtggtcgagtaatcacttgaaatttgccaaaacaaggttagtgtcgtggttaaccttgacttgagggaatagaacccttgaattatttgttacatgaatttcatgtgtaacgacgtataggtgaggtgacgggagcctatacgtcgtcaaattgattgtttgcatatttatctaaacatcatagattattttaaattattaattaattatggtattaattatttctctcatattccttgcccaatattatgccttgaattcatgttataatttgctacgtgcttacttgatttatgtatcttaattgccacttgacatttagcatattaaatattaagttgcctattttttctttgattttcacaattaattgctacttgtcattacttgtttcctcaataaatcataattactgtatgctttgttgcctaataatttcttattaaatgtgttaactattggaatatttttacatccaagtgttgttaaattatattgctggagcgggtttcacgccgcactagatttattttaagtttatattgttggagcgggttgcatgccgcaacggaatttaattaaaatattatattgttggatcgggttgcacgccgcaacggattttatattaagtttatattgttagagcgggttgcacgccgcaacagaaattaattaaaggattatattgttggaacgggttgcacgacgcaacagaatggtaaaagaaattattggctatgaatgttgaattgacttcagttattgatatgatttaactgttttacctatgttcctgttgttgttgttgttgttgttgttgttgttgttattattattattattattattattattattattattattattattattattattattnnnnnnnnnnnnnnnnnnnnnnnnnnnnnnnnnnnnnnnnnnnnnnnnnnnnnnnnnnnnnnnnnnnnnnnnnnnnnnnnnnnnnnnnnnnnnnnnnnnnnnnnnnnnnnnnnnnnnnnnnnnnnnnnnnnnnnnnnnnnnnnnnnnnnnnnnnnnnnnnnnnnnnnnnnnnnnnnnnnnnnnnnnnnnnnnnnnnnnnnnnnnnnnnnnnnnnnnnnnnnnnnnnnnnnnnnnnnnnnnnnnnnnnnnnnnnnnnnnnnnnnnnnnnnnnnnnnnnnnnnnnnnnnnnnnnnnnnnnnnnnnnnnnnnnnnnnnnnnnnnnnnnnnnnnnnnnnnnnnnnnnnnnnnnnnnnnnnnnnnnnnnnnnnnnnnnnnnnnnnnnnnnnnnnnnnnnnnnnnnnnnnnnnnnnnnnnnnnnnnnnnnnnnnnnnnnnnnnnnnnnnnnnnnnnnnnnnnnnnnnnnnnnnnnnnnnnnnnnnnnnnnnnnnnnnnnnnnnnnnnnnnnnnnnnnnnnnnnnnnnnnnnnnnnnnnnnnnnnnnnnnnnnnnnnnnnnnnnnnnnnnnnnnnnnnnnnnnnnnnnnnnnnnnnnnnnnnnnnnnnnnnnnnnnnnnnnnnnnnnnnnnnnnnnnnnnnnnnnnnnnnnnnnnnnnnnnnnnnnnnnnnnnnnnnnnnnnnnnnnnnnnnnnnnnnnnnnnnnnnnnnnnnnnnnnnnnnnnnnnnnnnnnnnnnnnnnnnnnnnnnnnnnnnnnnnnnnnnnnnnnnnnnnnnnnnnnnnnnnnnnnnnnnnnnnnnnnnnnnnnnnnnnnnnnnnnnnnnnnnnnnnnnnnnnnnnnnnnnnnnnnnnnnnnnnnnnnnnnnnnnnnnnnnnnnnnnnnnnnnnnnnnnnnnnnnnnnnnnnnnnnnnnnnnnnnnnnnnnnnnnnnnnnnnnnnnnnnnnnnnnnnnnnnnnnnnnnnnnnnnnnnnnnnnnnnnnnnnnnnnnnnnnnnnnnnnnnnnnnnnnnnnnnnnnnnnnnnnnnnnnnnnnnnnnnnnnnnnnnnnnnnnnnnnnnnnnnnnnnnnnnnnnnnnnnnnnnnnnnnnnnnnnnnnnnnnnnnnnnnnnnnnnnnnnnnnnnnnnnnnnnnnnnnnnnnnnnnnnnnnnnnnnnnnnnnnnnnnnnnnnnnnnnnnnnnnnnnnnnnnnnnnnnnnnnnnnnnnnnnnnnnnnnnnnnnnnnnnnnnnnnnnnnnnnnnnnnnnnnnnnnnnnnnnnnnnnnnnnnnnnnnnnnnnnnnnnnnnnnnnnnnnnnnnnnnnnnnnnnnnnnnnnnnnnnnnnnnnnnnnnnnnnnnnnnnnnnnnnnnnnnnnnnnnnnnnnnnnnnnnnnnnnnnnnnnnnnnnnncgtataggttgatgtaagcgacctgccttagcctcgtcaaaatattcgtcgaggttagtgttacgatccaatttcacctataggtcgtgatgacgcccaacactatagccaggcaagccaactaataaattaaatatatatcgatagaatttaaatccaagaaaaatgataagataccaatttctaccaacgtgtgtgtgccaagacctggtgtcacaagtgtatgagcatctagtagattatacaaaatttcaaatactgtctgaaatgaaaatagaccgaattaaaaatacaagaagaggcactggtagctgcaggatggctcagaaaggcagctcaccactacgcctctggataacgaggatgtgcgatgataggtcctccactatatctatctcagatcctgcacaaaaagtgcagcaagtgtaggatgagtacataaacaacgtgtacctagtaagtatcaagcctaatctcgaagtggtagagacgagatggccgactttgacactcactaaaggtcaataataataagtggaataaattataattattcaaattagcatgattcagagaatttaacaataattttattcaattagcagaaataataaaaatccatcaaatgcaacaatttttaatctattaattaaatccttcaattttaataaaatttccaatttatcaaatagctttacaagttgcaattaaatttcaataaatttctaatttatcaaataactttacaagctgcaataaactgtccaagtatcgtataattattattattattaagcagatttctgccgaggtcgtacgacccgatccaaagtattgtatacactaccgagggacgtgcagcgcaatccatagatgcatctatcctgccgaggcgttcggcccgctccacaagaaagggggacattttcttatgtacctccagaatgagagtatatttattataagataaattctggaggaagaacaatttctcttaacaattaattaatttaaacagaaaatttaagcatatgagattttcctcctttaatatcttccctaacaattcacaatatatatatatatcaaataatttaattaagtaatgactacaatttacacaagtaattcatgcttttgagtcctaaactagctggactttagcattaatagtagctacgcacggactctcgtcacctcgtgcgtacgtagcctccacaattagaaacaattattactttaattacctatggggtaatttccccctcacaagattagacaagagacttacctcattttgctccaatttaatccactagtaggccttttcctcgattatccaacttcgattggtttgaatctaactgaaaataattcgatacaatcactaaaatttataggaatcaattctgtaagaaaatactatattttcaataaaaatcccgaaattaattaaaacttcgaccgtggggcccacatctcagaatctggcaaaagttacgaaatccgataacccattcaattacgagtccaaccacaccagtttcactcaaatccaactccgaatcgataccgaaatctcaaaaattcatttatatgagatttctaaaaatttcccaaatttaaatctcaaaacactaattaaatggtgaaaacaatgatatatttgtgtatatagaccaaatccgagttagaatcacttaccccaatgtctttnnnnnnnnnnnnnnnnnnnnnnnnnnnnnnnnnnnnnnnnnnnnnnnnnnnnnnnnnnnnnnnnnnnnnnnnnnntaaaatcgcctccgctcaagctccaattttgttaaaaatggcgaatgggacgaattccctcttttataaattctacctagggcagccttcggaactgggcctcgaactggcttcgaccatgggcctcgatcgtggcttcgaccgtggccctcgagcctaagccttgatcatggattcgatcacaggctcgacccttgacttcggtcatggcctcgattatggcatcgagcctggcccttcgatcatggcctcgatcctagcatcaagcctcagccttcgatcatggcatctagcctgagccttcgaccatggcatcgatcatggcatcgagcctgggacttcgatcgtggcttcgatcacaagctcgagcttgagcctcgtcaaccctgggctcgatacctgggctcaatatctgggctcaatagctgggctcgatcacaacccagaatatccaacataagaggaaaaattgcagcagcttttaagtccaatatttgatcctttaatcatctgaaactcacccaaggccctcgggacctcaaccaaatataccaacaaatcctaaaacattatacggacttatttgaaacctcaaatcacataaaacgacgctaaaaccacgaattatgctccaattcaagcttaatgaaacttaaaatttccaacttctacattcgatgtcgaaacctatcaaatcaagtccgattgacctcaaattttgcacaaaagtcataaatgacataacggagctatgaaaatttttaaaactgaattccgactccgatatcaaaaagtcaactccccggtcaaacttccaaacttaaattcttggtttagccatttcaaacctaatttcactacagacttccaaatacaattccgatcacactcctaagtccaaaaccaccatacggagctattgcaatcatcaaaattttattccgcggtcgtttgcacataatttgacatccggtcactatttgaacttaaacttttaagtttttatcaaaattctatatctcgggctagggaccttggagtttgattccgggcatacgcccaagtcccaaatcatgatacggacctatcggaactgtcaaaacactgatccgagtccgtttactcaaaatgttgaccaaagtcaacttagttgagttttaaagctctaatccatattttaatccatttttcacataaaaagttcccggaaaattttacggactgcgcacgtaagtcgaggaatgataaatagtgctttttgaggtcttaaaacacataattaattattaaatttaaagatgacatttttgggtcatcacagttaggctcggcacttacagagtacatggggtcggttgtactcatactatactctgcacttcttgtgcagataccgaagttaatcccatcggcatactatagatatttcttggattcagctatcagaggagacttgaggtatagttgcacgacgttcgcagctctgaagccccttccactttattttagctgtctgcttactttcagacaactttatttttatttagacccttgtttgtattattctagaagctcgtgcacttgtgactccagttctgggatggtatttagacatcgttattattttggttgttcatttaaatttcagatattatttcggttgttggtctctttactgttctagaagctcgtgcacttatgactccaggtctgggatggtatttagacatcgttattattttggttgttcatttaaatttcagatattattctggttgttggtctctttactgtttaattaagatgaattgttaaaaatggttaaaatcattctaacgttggcttgcctagcaagtaaaatgttaggcgccatcatggtcccaaaggtgggaatttcgggttgtgacactttgccactgtctcccgcatagccgagaggctctccctattaagttcctcgctctgtgaggaagtccctattccttgaatttcacacctatagtgatggaatgttttctcaggaagctcgtatactttcctcctttttggaccgccaacagtctccaaccatattattttagcatcctcgtacgaaggttgggttggctcgccagattcaccagctggctgactacgaatgaattcctccacgttacaatggtagcggccctatattattatttaaattaaattagtatttaaaaattcttataaaagtaaattataacacttaaagaaaattaaaagcttacatatgcagtctctacccgttcctcaacccatctatctccaccccctctttcttcttctttaaaatatgcgtctccttgaatagctcatcatggctcattagacgcccaaacttcttttcctgaaaataaattaatttagttaataaatagaattgatatacttagaaaagtaaaataatttaagcaattaccaatcttcttcttattgtcccgatgctgatagcaccccagtgtgcaaggagcctcccttctcggatgagtgagctttctttcccttttcgctcttctgtaagagatcctcggtctgccattgccttaacaaatcatcccataaatgctgcagacaccaattaggcttcttgttcttctttttaccatccgagaaatgatccgacaatctcttgcaggctttactagatggaaacatcatatatataaattattaaactgctcaaagaacatttatactttaaactgattgaaaaataattgagatatttccataattattacaacttaatttattctacaattataaattaattaaatcatttttaattaattaagataattaatttttaataattacacccaaaatgttcaacaattatccctaaaagttcaattcacatccaaagagttcaaccattacccctaaaagttcaattcatatcctaaaagctcaacccgtaccctaaacaattaaattaataccctaaataatttaattaacctcacacaacataagctccatccgaaaagttcaacacttaccaataaaaattcaattcataccctaaaagttcaattcacaagaacaaatcctaaaaacacaattcaattcaaagttaaacattcaattcataataaaactactgaggtcaatacaaacttaaacattgaatttacaccctaggtaatcaattcagttcaattcaattttaacatgacctaaaccctagatttcaataaaattcaaatttaaacaattcataacgaaataacaaaatattaaaattatacaaacaatgtaagttcaaatcgaaagttggaagttttaggaggtggagggggaggggcaatggaggccgtagcaacggacatcggcggcgggggcagtggcgacgtggggtagggaatgggatttgtgtgagggaaataaagaaggagatggggaagggtgttatgtgtgtgagggagaagagaatggggagttagaaaattttgagaagagagtaagagaaatgagggaaaaatcccgtatttgggatctggaattagaattaccgaccaacgttggtcggtacactaagtgaccgcgcgttgactgtgtttgactattaaccgaccaactttggttggttatttttttttaaaaaactaaattatttttttgtgtttttatttcttaaaatattataaactataaaaaattattataaactataagcatttattttattcacatatatatttactataaataattataaactataagcataatctgtataaataactatattaactaattaattttaataaattataagcatatatgttattcacacatatatataattaatcaatcataataataaaaaataaaggtatatagtatatgagacgtttattttattcgaattccacatttcgtcttatacattcattcattttataactaattacaaatcacatagattaataaatatcggtcaagatgttttaccttttatattcatctatctaagttaattttctaagttataattaagttgtcatgacccaaaatctacctagtcgtgatggcacataacccaaccggtcaggtaagccaattaacaactattcaattcaattaatatttaactgactctaatatactccccaaggactggtagtacaaatcatgagcttctaagattagaatttataaagctggtatgaaataaaacatcatctgttcgaaacgtacataaacaatttttttttataaatctaaggctaccatgaacaagaggcagctacaaccagaacaaaggtatgtattcaaatccagctctcgtccatcacagcagcatcaacatccaatatctgcacgcaaggtgcagaagtgtagtatgagtacaaccgaccccatgtactcaataagtaacaaacctaaccttannnnnnnnnnnnnnnnnnnnnnnnnnnnnnnnnnnnnnnnnnnnnnnnnnnnnnnnnnnngtgacgagctggataacaggccggagtccaacaccaatagcaaacaacagttcataacaacataatgaaagtaataaaagaagtatctgagagataaaatgttcaaatcattcacagttccagaaaaataggcatatttttcaagtatatcagcgaaaacccaaatcttttgccgaaatcaccaaaatatgaatacgttttgtaaaaatgtgattttttccccaaaacctttcaacaacagataggatgtttcattttcaaatggcatgaggaaaatacatctctatgcctacatgtcaatgagtatgtgaagtnnnnnnnnnnnnnnnnnnnnnnnnnnnnnnnnnnnnnnnnnnnnnnnnnnnnnnnnnnnnnnnnnnnnnnnnnnnnnnnnnnnnnnnnnnnnnnnnnnnnnnnnnnnnnnnnnnnnnnnnnnnnnnnnnnnnnnnnnnnnnnnnnnnnnnnnnnnnnnnnnnnnnnnnnnnnnnnnnnnnnnnnnnnnnnnnnnnnnnnnnnnnnnnnnnnnnnnnnnnnngatgacgcaatatcgtacatcatgagaaaaatgcatcaatatgcctgtatgtcaagtgtgcatgtcaatgcgatgcaactcaatgataaaaccatgtgcatactcccagagtattaattcacccagtcctccaattcacttagtcctcacagtcacttaatgctcaaagtcactcaatcctcttaatcgctcgacactcgcactcagtaggtacttgcgctcactgggggtctgtacagactccggaagggctccttcagcccaagctctataatctgcacggactagtcacgtgctatagtatcaatatctggatccgcacggacaactcacgtgttatagtataaatatttagatccgcacggacaactcatgtgctgcacgaacaactcaggtgctataataagacaatctggcatgctgcggcatgcaacctgatcccataattatcctcacaatcagtccctcggcctcactctgtcgtcaatctctccagtctatcaggctcacaatgtcataaaactagcccaaaataatgatatgatgtatcaataaataacaatagagactgagatatgatatgcaatgaatgaatatgactgagtatgaaattatagtttaaacatataattagatagtcaaaataaccatatggagctattagaactatcaaaactctattccgtagtcgtttgcacaaaaagtcaaatagatcaagtcttttcatttaagcttctaaacaaggattgttctttcacttaaatcccgaatcatccgaaaaccaaagccgacaattcacacacaagtcataatacgcattacgaagctgctcaagacttcaaattgtcgaaaggagcatatatgttcaaaacgacaagtcaggtcattacattctcccccacttaaacatacgctcgtcctcgaacgtgccaagagttgttcctaaaccttcaaatcactattccaccttaccactagggctgttcatttggatcggatatccgaaatccgaaccgatccgcttaatttcagatttcggatttcagatatttggaacggatttcggattgtgtttattaaattttggatattcggatcggattcggattggtataattgtaaaccgatccgatccgaaatccaaaattattagggcatgtataaatattaaactttaatttcggatagtctgtacttcctttacatcttcctccaagttattacctttacaattgctggatttagctatattggcaccatagtactctcataattgcataaacatgannnnnnnnnnnnnnnnnnnnnnnnnnnnnnnnnnnnnnnnnnnnnnnnnnnnnnnnnnnnnnnnnnnnnnnnnnnnnnnnnnnnnnnnnnnnnnnnnnnnnnnnnnnnnnnnnnnnnnnnnnnnnnnnnnnnnnnnnnnnnnnnnnnnnnnnnnnnnnnnnnnnnnnnnnnnnnnnnnnnnnnnnnnnnnnnnnnnnnnnnnnnnnnnnnnnnnnnnnnnnnnnnnnnnnnnnnnnnnnnnnnnnnnnnnnnnnnnnnnnnnnnnnnnnnnnnnnnnnnnnnnnnnnnnnnnnnnnnnnnnnnnnnnnnnnnnnnnnnnnnnnnnnnnnnnnnnnnnnnnnnnnnnnnnnnnnnnnnnnnnnnnnnnnnnnnnnnnnnnnnnnnnnnnnnnnnnnnnnnnnnnnnnnnnnnnnnnnnnnnnnnnnnnnnnnnnnnnnnnnnnnnnnnnnnnnnnnnnnnnnnnnnnnnnnnnnnnnnnnnnnnnnnnnnnnnnnnnnnnnnnnnnnnnnnnnnnnnnnnnnnnnnnnnnnnnnnnnnnnnnnnnnnnnnnnnnnnnnnnnnnnnnnnnnnnnnnnnnnnnnnnnnnnnnnnnnnnnnnnnnnnnnnnnnnnnnnnnnnnnnnnnnnnnnnnnnnnnnnnnnnnnnnnnnnnnnnnnnnnnnnnnnnnnnnnnnnnnnnnnnnnnnnnnnnnnnnnnnnnnnnnnnnnnnnnnnnnnnnnnnnnnnnnnnnnnnnnnnnnnnnnnnnnnnnnnnnnnnnnnnnnnnnnnnnnnnnnnnnnnnnnnnnnnnnnnnnnnnnnnnnnnnnnnnnnnnnnnnnnnnnnnnnnnnnnnnnnnnnnnnnnnnnnnnnnnnnnnnnnnnnnnnnnnnnnnnnnnnnnnnnnnnnnnnnnnnnnnnnnnnnnnnnnnnnnnnnnnnnnnnnnnnnnnnnnnnnnnnnnnnnnnnnnnnnnnnnnnnnnnnnnnnnnnnnnnnnnnnnnnnnnnnnnnnnnnnnnnnnnnnnnnnnnnnnnnnnnnnnnnnnnnnnnnnnnnnnnnnnnnnnnnnnnnnnnnnnnnnnnnnnnnnnnnnnnnnnnnnnnnnnnnnnnnnnnnnnnnnnnnnnnnnnnnnnnnnnnnnnnnnnnnnnnnnnnnnnnnnnnnnnnnnnnnnnnnnnnnnnnnnnnnnnnttttgaggcataataatccgatccgaaatccgaaaatctgatccgatccaaactttaaaatccgatccgatccgatattaattcggatcagattcagattgcattttgtagaatccaaaatctgaatccgaaatgtgctaaatccgatccgatccatgcacaactctacttaccacgcacatacccggtggtgatcccacgccaccctattccatataggcgtgacaacacaacataattgaagatcatcactttaatcttagtccgtaaaacttataacccaatttccaacatctagaatttcttacaagacccgaatctcacatctacacactatataagtttgaacaaactgtatcaagtcataaccatgaccccagatatagtcacataacatactacacaactcacatactcgtagcaataatttctaatcaccatagtgcttaaaaaaaatgaactcgataccgttgataaacctcatatcaaaaaccttcgtacactgccaataatgaaagaaacactcaaaaactcataaccactcatcagatcaactagtcatggagctctctcgctccaaccagaaccataatcactttctaagctgactttcgatattattctcccaaatataccgtaattaaatctgatagtattcattctaggtccaatgacctcatctcatcaaacacaaccactttattgacttgaaaccccaacataacctaatatttacaaccaactcctcaaattttgtgaagaggataaccgtaggcgcatgtgcacaattcctcaaatacactactcaaataatttttatcgtagaggaaggaaaacaatgaaatcaaataaattatcaaagaaatgaaattcccacacactgcacggacaattgcttcggtgcccgcacatgggctcaaacctcacatatatgcccattcatagcgcgtagctataaaaaataattaatgcaactagtgtctccactaagtttaaataaaatactcacctcaaacaggtcacaaccctgaaacaacatgcttctgagaactcccagtctccaaattcataggacacatgaatcaccgtaactggtccctactccaacactcgaatgactaacaaatctttcatgtacgatcatcccattgacaatcaagtcaactttctcaaccggattcaaattcagatctcaacacatacatcctgttggtagaaaagaaactctccgctcaacattataaagagcacacctccgtagattactccgcatgagataacccacatgctttgcctaaaattggcatcttgatataccctttcgcatccacaatcactatgcgatcaattaatctccctaagtccgaactcatcaacaagacatgaaaatctacttcgctccataattaaataatatgaaagatcctttaacatattcatactcgagactatacgtcaaatcaagacagacaccaagtacccaataaaaccatctcaagcaatctattctcgtcataatcaaactatctgaacacattccgcagtcacgtcatgctgatcatatagctattcaacccctcatcgagccacaaattccactcatagggacactaccggacatatgagtccaaatgtacaagttcacacaactgaagctaccgagcctaagatgtagtctaaacctagcctcaagtactccagactggcccatcgcccaaaacacagaatacacatctcgaacctcattcatggaatcataagccgacgatgcacaactgataccgagtgcttacatgcgcacatgaatgcgtggaaggaattcaaagagttatgtttcaagctgaatcaatttcgcacgataaggaaagaaagctggaaattatcctaaatgtcctgtagcctctcgaagataagtatggacgtcattatacctattcgcaaaactttactagacacttgctcatgacttgtcaaacctatgaacctagagctctgataccaacttgtcacaacccaaaatccacctagtcgtgatggcacctaacccaaccggtcaggtaagccaattaacaaatattcaattcaattaatatttaactgactctaatacactccccaagaactggtagtataaatcatcagcttctaagattagaatttacaaagctggtatgaaataaatacatcatctgtttgaaacgtacataaacagatttttttataaatctaaggctaccatgaacaagaggcagctacaaccggaacgtaggtatgtcttcaaattcagctcccgtcgatcataacaacatcaatatccaatatttgcacgcaaggtgcagaagtgtattatgtgtacaatcgacccatgtacttaataagtaacaaacctaaccttatgttgaaagtagtgacgagttagatcacaggttggggtccaacaccattatccaacaacagttcataacaacttaatgaaagtaataaaagaagtagctcagagataaaatgctcagctcgttcacagttctaaaaaaataggcatgtttttcaagtatatcagcgaaaatccatatcttttaccgaaatcaccaaaatatgagtacgttttgtaaaactgtaatttttttcccaaatacttttcaacaacagataggatatttcattttcaaatggcatgaggaaaatacatctctatgcctacatgtcaatgagtatatgaagtcatggatgacgcaatatcgtacaacatgagaaaaatgcatctttatgcctttatgacaagtgtgcatgtcaatacgatgcaacttagtgataaaaccatgtgcatactcccagagtatcagttcacacagtcctcccagccactcagtcctctcaatcaatcagccctcacagtcgctcaatcctcacagtcactaaatcctcccaatcgctcggcacacgtactcagtaggtacctgcgctcactgggggtgtgtactaactccagaggggttccttcagcccaagcgctataatctgcatggacaactcacgtgctgtatgtataactcacgtgctatagtatcaatatctaaatccgcatggacaactcacgtgctatagtatcaatatctggatctgcacggataaatcacgtactgtacgaacatctcacgtgctataataagccaatctggcctactgcggtgtgcagcccgatcccataattatcctcacaatcaggccctcggcctcactcagtcaggaatatctctaggctctcgggctcacaatgtgatgaaactagcccaaaataatgatatgatgtatcaataaataacaatagagactgagatatgatatacaatgaatgaatatgactgagtatggaattacagtttaaacatataattccatagtaaaaatgacctcagtgggtcccaataataccaacatttgcctaagcatgatttctaatatgagtcacatctcagtttctataacacataaaaatacatggaaaaatacaagttaattgactatacagctctacagaatcaaccgagtctcaatttctaaggtgcaagttgtaacgacccgaccggtcgttttgagtattacaatcccgtttccctatttactactcaaattgggctttacagttgttgtgtgactggccagggcaataggttcgggtccggtgaggttttggaataaattgaaacacttagttccaaggtttaaagtttaagttaaaatagtgaccggatgtcaacttttatgtaaacgacctcagaatttagttctgatgattccaatagctccgtatgctgattttggacttaggagcttgtccggaaaattatttggaggttcgtattggaattaggcttgaaatgccaaaagttgaatttttgggaagtttgaccgggggttgactttttgatatcggggttgaaatccgattctgaaaattttaataggtccgttatgccatttatggcttgtgtgcaaaatttgaggttaatcggacgtgatttgatagaattcggcattgtttgtgaaaacttaaaatttgaggtcaatcggaccggttgtatatgagtgatgttctcccgaggggctgtttatgattttatcactgagttgcatcgcattgtcatgcacacatgacttataggaatagagatgtattttcctcatgttgtacaacatcatatcattcatgatttctcacacattttgacagatgggcatagtgatgcatttgttttacacaggctannnnnnnnnnnnnnnnnnnnnnnnnnnnnnnnnnnnnnnnnnnnnnnnnnnnnnnnnnnnnnnnnnnnnnnnnnnnnnnnnnnnnnnnnnnnnnnnnnnnnnnnnnnnnnnnnnnnnnnnnnnnnnnnnnnnnnnnnnnnnnnnnnnnnnnnnnnnnnnnnnnnnnnnnnnnnnnnnnnnnnnnnnnnnnnnnnnnnnnnnnnnnnnnnnnnnnnnnnnnnnnnnnnnnnnnnnnnnnnnnnnnnnnnnnnnnnnnnnnnnnnnnnnnnnnnnnnnnnnnnnnnnnnnnnnnnnnnnnnnnnnnnnnnnnnnnnnnnnnnnnnnnnnnnnnnnnnnnnnnnnnnnnnnnnnnnnnnnnnnnnnnnnnnnnnnnnnnnnnnnnnnnnnnnnnnnnnnnnnnnnnnnnnnnnnnnnnnnnnnnnnnnnnnnnnnnnnnnnnnnnnnnnnnnnnnnnnnnnnnnnnnnnnnnnnnnnnnnnnnnnnnnnnnnnnnnnnnnnnnnnnnnnnnnnnnnnnnnnnnnnnnnnnnnnnnnnnnnnnnnnnnnnnnnnnnnnnnnnnnnnnnnnnnnnnnnnnnnnnnnnnnnnnnnnnnnnnnnnnnnnnnnnnnnnnnnnnnnnnnnnnnnnnnnnnnnnnnnnnnnnnnnnnnnnnnnnnnnnnnnnnnnnnnnnnnnnnnnnnnnnnnnnnnnnnnnnnnnnnnnnnnnnnnnnnnnnnnnnnnnnnnnnnnnnnnnnnnnnnnnnnnnnnnnnnnnnnnnnnnnnnnnnnnnnnnnnnnnnnnnnnnnnnnnnnnnnnnnnnnnnnnnnnnnnnnnnnnnnnnnnnnnnnnnnnnnnnnnnnnnnnnnnnnnnnnnnnnnnnnnnnnnnnnnnnnnnnnnnnnnnnnnnnnnnnnnnnnnnnnnnnnnnnnnnnnnnnnnnnnnnnnnnnnnnnnnnnnnnnnnnnnnnnnnnnnnnnnnnnnnnnnnnnnnnnnnnnnnnnnnnnnnnnnnnnnnnnnnnnnnnnnnnnnnnnnnnnnnnnnnnnnnnnnnnnnnnnnnnnnnnnnnnnagaattttatctctgtattacttctggtattattttctttaagttgttatggactgttgtggactattggttttggacccgatcccggtggaagctcgtcactactttcaacctaaggctaggtttgttacttactcagtacatggggtcagttgtactgatactacacttctgcatattgcgtgtagatgttggttgttgttgttgctgtgctcgatggttgtgggattgaagatgtacctgcgctcctgttgtagctgcctcttgttcatggtagccttagatttataaaagctttgtttatgtattattcaaatagactatgtatttattttatctcctctttgtatactctattcttagaagcccatgatttgtactaccagttcttggggattgtataagattaagatctttatttacttaaattactttaataatggttattggaattggataattgaaagttggcttacctagcaggttgggttaggtgccatcacgactagttagattttgggtcgtgacaaggtggtatcagagctctagtttcataggttctacaagtcatgagaaagtgtctagtagagtcttgtggatcggtatgatgatgtccatacttatcttcgagaggttacagggaatttaggatatatacttcccatctttccttctttatcatgcggaattgattcagcttgggacataactctttgaattccttccacgtattcgtatgcacacatgagcactcggtattagctgtgcatcgacggcttgtgattctttgaacgaggttcgaggtgagtattatgtgttttggtgatgggccggtctggaggacttgaggccatggttagaccgtagcttgagctcggtagcttcagttgtaacctgtataattggactcatatgtccggtaatgaccctataatggaatttgtggctcgatgagcggtggaatagttttgtgatgagtatgatgtaactgcgggatgtgttaagacgatttgaatgtgacgtgaagtgtttccttaaaatgtaaaggaaggccatagggtgcttgattttcgttttgatgtgacgtacagtctctagtgtgaatgttttgaaggatatttcacgattgttaaattttgggacaaattaatttttcatgtctggttagtgagtttggactcagaaagactaagttatttgacttcgaaagggtatatcaagataccaatttgaggttaagcaggtgggttattccctgcggagtaatctacataggtatattacttatgatgtgagtggagagttttttttctgccagtcgggcatatgtgtggagatttgaatttgaatctggctgagaaagttaacttgagtgtcaagagaatgattgcgagcttagcaaatgatttggggtattgttttggttggcgttgcatgagtttgagaagaagttttgttgaacagactgtggcattatgatagtaatagagtattggtattgtgagttatggaatgttttaatctatggctttgagccaagtgggggagcctgttattgataattcaatttcatgattatatgtaaaggtttagttttaggctgaggcatactggtgggttagttatgacgtgcaaaagttgagatcgatgatgactcgaataaggaaattcctgggtacgggttatattgcacttatgagtatatgaaaatcgtgggatgagtgagttgttataggtgaatgatgtagtgcgcacaaagtatcaatttgataggttgtgttaaagtagagttacttctttgagtattgttgtgctaatggggcacgtgtcttttggcccatttgggcggtgcaatttagatttgagcaaagtgggtgacttccgagagaattctagtaggtttgagaattttatatagcaattgagaatttctccagacttgtgtatggataaaacctgagatttgcatttgatggttcctggacttacgaaagttctgtatgactagggattctacattttagtataatgaaggtgagaagaacagttttagattcacataaggtatttgcagagtgagtgttatagttgtggtgtttctggaggtggttaggaataatacatttgcttatgggccgtagggcgttgtggttctatgttagggttcgtggggtgaattgtggttaaagatcgtggtgttttagcaaggagaagtatcaatctgaagacaaattcggaagggacttggagaaaataggacaactgggtagtagactggactagtatggtaatggtaggatcggtcctttgggtaattacgatgtggtaagactttgcagatattttggtggcaatatttttgggtttggtgacctgcgtggcttggttgagttggagagattcagtcctgatggcttggttgtgcaaatggattccaaagtatttttgatggtttctaccgatgtggagaatgtgttgtgtattgtgatttcctcctagaaagaagcaagagaaatgtttctaactaaaagggtatgtaaattattggtgactcaaagttgataatgagattcttgtgcttgtcacatgatggcataatggatgtggtgtgttgtgtgggattatgatttacatgtacaaggtgacagttcagtcttgaagagaaggtaacgaatgttggacaacatgggcggtttcaaatgactagatgaatacgattactactaggtgtatgagaagggtgcgtatttcagaaggcgcattatattttgacttacatatgtttaattagtattgcggtactcacatggttgataaactgctgatattcaaattttgccaagtggaacggaagaacttttaaagtatttctcatgggatgatcgtgtatgagagaggtgttaggcattcgggcgctggagatggaatcaaatatggtgattcatgtgttctatggatttggagatttgggagttctcaggagaaaattgtttcatggttatggactgtgaagttgtggtcggagctacctagatgatagaatgtgttgtgattcagtcattatggattttggagggatttgtatctatttgtgggtaacccgagttgatttgggggtccattggtaggcccaattaagatgtgtattctacaccgagccggaatggttggctccatactgctattgttgagggatatgccattcggttgatgttgaacttattcgtgtcctgaaatgaactgtgagttacacctttatgctacaaggagctgtgattcattggttatgtgcacatatggtatggttctatttgagctttatagcggaatttgagtgcgatgagtgtttgggtattacatgattgattgcgtaatggttatgttctttcaggttttgtgtggcatttttgtcatttgcctctctgttgttattgattttgagcggggtggctcgaggtatatattatggaccagcatttggatggggtcacgcattgcagcggagttatgttaaggtatgaaccttgtgttagaatcgggtgatggttctacggtgtatgatgaatttttagcgtttcgttgtggcagtacttgttaatctggcggggcagttctctcatttgagttattttccatgattgagtacatttgaattgttgcgtattggtacgcggatggcacgtgatgtggctctgagttatattggtgcggcatgtctatggaacaattgtgtttagtaaaataaggtcagtggacatggaataggtactatcaggtttgaaatggtatattcgagaggataatattgaaattctgcttagaaagtgattatggttctggttggggcgagagagctccatgacttgttgatctgataaggggtcctgagatttctgcgtggttcttttattatcaacagtgtacgaaggttttgggatgaattttggttagatatggggtttaatactagtacctggttggttttggagtagttactgtgatcaggaatggtgctacgagcatgcgagttgtgtaatatgctggctgattatatctgtcattatagttatagctcgatgcagcttgttcggacttatacaacgtgtagatctcagattgaggtcttgaaaagaattttggatgttaaaaatttggctccatgggttttgggctaaggttaaattaacgattttcagttatgttgtgtggtcaggcctatatagaatagggtgacatgagatcacccaaagtacgtgtgtggtaataaggaaccatgatttgatggcttggaaacaactcttggcacgtttgaggatgaacgtatgtttaaatgggggagaatgtaacgacccggccggtcattttgagtattacaacatcatttttccatttactgctcaaattggttttatagttattgtgtgactggccggggcaattggctcgggtccggtgaggttttggaattaattgaaacacttagtttcaaggtttaaagcttaagttaaaatagtggccggatgtcgacttatgtgtaaatgacctcggaatttaattctgatgattccaatagctcagtatggtgattttggacttaggagcgtgtccgaaaaattatttggaggtccgtagtggaattannnnnnnnnnnnnnnnnnnnnnnnnnnnnnnnnnnnnnnnnnnnnnnnnnnnnnnnnnnnnnnnnnnnnnnnnnnnnnnnnnnnnnnnnnnnnnnnnnnnnnnnnnnnnnnnnnnnnnnnnnnnnnnnnnnnnnnnnnnnnnnnnnngggaagtttgatcgggggttgactttttgatatcggggttgaaatccgattctgaaaattttaataggtccgttatgtcatttatggcttgtgtgcaaaatttgatgtcaatcggacgtgatttgataggtttcggcgttgtttgtggaaacttaaaatttcaaagttcattaggcttgaattgcatatgattcgtgtttttagtgttgttggatgcgatttaaagattcaactaagtttgtatgttgttttaagacttgttgctatatttggttgaggtcccgaggggctcgggcgtgtttcggatggtattcgaattatgtttccttcattttttgcactgctggtagctgctgatttctggtgttccaaaccttcttcgcgatcgcgaagatcggggcgcgatcgcgtaagcttatttggggtagaggtattttgttctatgcagtcgcagagaaaggaacgcgatcgcgtaagtgtattaagccgtgcttcgcgaacgcgtggatgaggtcgcgttcgcgtaaaagggtttgagcagtagatgaagggaggcaattgctttacgcgatggcatggggctgaacacgttcgcataggtttgtgaggcagtgatccgcggtcacgtgagtgatttcgcgttcgcgtaaggtaaaatgtgtgggcagtctgctttgtgcttcacgatcgcgaggacatttccgcgatcgcgattaagaaaatttgggtagtggaaaactattctttgcgatcacgtggggatgttcgcgatcgcgtagagcaaatgactgggcagagagtttaagttctgaaccattgttgacggattggagctcgggaagaggcgatttttggaagattttcagaggaaacaacggggtaagtgttcttacctcaatattggttaaattacctgaatttattattgtttttatcaacaaatcagtgttttgggttgaaaatagtagaaaacttcatagattttaattgaggatttgaaggccgagttgtggttggatttgagaaattttggtatggttggactcgtggttgaatgggggttcggattttgtgagttttatcagattccgagatgtgggccccacaagtgatttttggggcgtaatttcggatttttggaaaatattagtattttgatatgaaattaattcctataatttttgtgagctgaatcaaattaattgtgactagattcaaccgagttagaatcacttaccccaatccatatggtgaaaatcgcctcaaaaatcgcttcaatccgagctccatagctccaaatgtgttaaaatggccgaaacctcaaaatatatcttctgtccaggcatttactcttcgcgatcgcgaagcacaaaatttttcagccccaaaattgctcttcgcgatcgcggaaaacttcgcgatcgcgaagaacaaactccccaactcttccagacagcctctagtataatggtcataacttttgtacaaaactccaaattgcaaatggtttaactttctgaaaactagacaccaagggctataactttcatttgttgctcatctcccaattccttatagatttctagatataagcttccaaagtcagccctgtgcaacagagatttccaaactcttcccagacagcctatagtgtatccaccataactttttgtacacaactccaaatgacaaatggtttacatttctgaaaactagacatcaagggctacaactttcatttttggatcatctccaaattccttatagattgcgagatataagcttccaaagtcgggtcagtgcagcaggattttcctctacgcgatcgcgaaaaggcttccgcgatcgcgattcacagtgcccaaacagcaaaattgctcttcgcgatcgcgaccatttgtccgcgatcgcgatgcatacctctgtggccaaaaaccagcaactaagaatggcctagaaatggtccgaaaccaccccgaaactcacccgagcccctcgggacctcaaccaaatataccaacaagtcctaaaacatcatacgaacttagtcgaagcctcgaatcacatcaaacaacgctaaaactacgaatcgcacctcaattcaagcctaatgaactttgaactttcaaattctatatcttgtgccgaaatacatcaaatcaatccggaatgacttcaaattttgcacacaagtcataaatgacataacgaagctattccaatttccagaatcggattccgacctcgatatcaaaaagtcaacccccggtcaaacttcccaaaaattcaactttcggcatttcaagcctaattccactacggacctccaaataatttttcggacacgctcctaagtccaaaatcaccatacggagctattggaatcatcagaattaaattccgaggtcgtttacacataagtcgacatccggtcactattttaacttaagctttaaaccttggaactaagtgttccaattcattccaaaacctcaccggacccgaaccaattgccccggcaagtcacacaacaactgtaaagcccaatttgagcagtaaatggggaaacggggttgtaatactcaaaacgaccggtcgggtcgttacattctcccccacttaaacatacgttcgtcctcgaacgtgccaagagttgtttccaagccatcaaatcactgttccatcttaccacacacgtacccgggggtgaacccacgtcaccctattccatatgagcttgacaacacaatacaactgaaatcattgatttaactttagcccataaaccttggaatttaatttccaacctttagaatttctttcaagacacgaatcttacatttacaccctgtatgagtttgaacaagctgtatcaagccataaccataaccataaccacggacataatcacctaacatattacacaactcgcatgctcatagcaccattcctgaccacagtgactactccaaaaccaaccaaatactagtattaaacccatatcgaaccaaacctcatcccaaaaccttcgtacactgttgataataaaagaaacatgcgaaatttcatgaccacttaccagatcaacaagtcacggagctctctcgccccaaccagaaccataatcactttctgagccgactttcaatattatactcccgaatataccgaaatcaaacctgatagtacccattctaggtccaatgaccttatattactaaacactgttccatagacatagacaccaatataactcagagccacaacccgtgccatccgtgcaccaatacgcaacaattcaaatgtacccagtcatggaaaatgactcaaatgagagaactgccccgccagattaacaagtaccgccacaacgaaatgctgaaaattcatcatacaccgtagaaccatcacccgattctaacacaaggttcataccttaacataactccgcaatgcgtgaccccatccaaacgctggtccataatatatacctcgagccaccccgctcaaaatcaataaccacagagaggcaaatgacaaaaatgccacacaaaacctgaaagaacataaccattacgcaatcgatcatgcaatacccaaatactcatcacactcaaattccgctataaagctcaaatagaaccgcaccatctgtgcacataaccaatgaatcacaactcctcgtagcataaaggagtaactcacagatcatttcagaacacgaataagttcaacatcaaccgaatgacacatccctcaataatagcagtatggagccaaccattccggctcggtgtagaatacacatcttaattgggcctacctatggacccccaaatcaactcgggttacccacaaatagataaaaatccctccgaaaatccataatgactgaatcataacacatttatcatctggctagctccggccacaacttcacagtccacaaccatgaaacaatctgctcctgggaactcccaatctccaaatccatagaacacgcgaatcaccatatttgattccatctccaccgcccgaatgcctaacacctctctcatacacgatcatcccacgagaaatactttaaaagttcttccgtgccacttgacaaaatttgaatatcagcagtctatcaaccatgtgagtaccgcaatactaattaaacatccgtaagtcaaaatacaatgcgccttctgaaatacgcacccttctcatacacccaagtagtaatcgtattcatctagtcatttggaaccgcccatgttgtctaagaattcatgaccattctgcccaaacttcgttaccttccttcaagactgaactgccaccttgtacatgtaaatctaacttccgcacaacacataacatctatcttgccatcatgtgaaaagcacaagaatctcattatcaactctggtcaccagcaaattacatatccggttagttagaaacctttatcttgcttccttccaagaggaaatcacaatacacaacacgtttctcacaccagtagaaaatatccggttcccatggtagaaaccatcaagaacactttgaaaaatccatcttatagtctcaagccaccatcataattaccatataaataccacaaccgaaacacccactctgaaaataccttatttgagtctaaggccgtttcattcaccttcctgataccaaaatataaaatccataatgatatacaaaaatgccacaagtctcgacaccatccaacttaaatctcagattttagccgcaaacaaatccgccaaaaattctcaattgttacatataaatctcgaatccattagaactttctcgagaatcaccccctttgttcaaatccacattacaccgcccaaatgggccaaaagacacgtgccccattagcacaacaactctcaaagaagtaactctactttaataccacctatcaaattcatactccgtgcgcactacatcattcacaaataacaactcactcatcccacgatttttcatatactcataagtgcaatataacccgtaaccaggaattttccttattcgagtcattttcgaactccacctctgcaagtcatcactaattcccaagtatactttagacccaaacaaaatttgacacatacccatgaattgatttgtctatagcaggctcccccacttggctcaaagccatagattaaaacactccataattcacaatacccataccctattactgtcataataccgtagtcagtgccacaaaattcttctcaagctcatgcaatgccaaccataaaaataccccaaatcatccgctaagatcgcaatcattctcttgatactcaagtcgactttctcagccaaattcaaattcaaatctccacacatacgccccactggcagaaaagaaaccctccactcatattacaaggaacacacctacgtagattactctccaggagataacccacctccctagcctcaaattggcatcttgttatatcttttcgcagccacaatttctacgcaatcactaaatctttctgaaccgtttggaagttgatacgcgcagaatggaatttctggagcattgcttagcttgctcgacattggatttggcttattcgaggtaagtaactcttctaattttggagctgagggtatgaaccctgaatatatgtattatgtatatcgttgggaggtgacgcacatgctaggtgacaggcgtgtggacgtgcactatagaaattgtgacataattgtttctgtggaattttgtagttaaataatcttggcattttccatgcagctttatgagttaaagaaattgagctgaaaagcatattaaaattcatgttgaggctatgtgccaatattattgggacccatagaggtcatattgctgtgaattgttgtgttaaattgaaaattcatactcagtcatattcatttcattgcatatcatatctcaatctctgttgttatttattggtacatcatatcatcatttttgggctatttttcataacattgtgagcccgagagactggagagattgatgactgagtgaggccgaggacctgattgtgaggattagtatggatcagggctgcccgcctgcaacatactttattattatagcacgtgagttgtccgtgcagcacgcgagttatccatgcagattatagcgcttgggctgaaggagcccctccggagtctgtacaccccccagtgagcgcaggtacttactgagtgcgagtgccgagttctgagtgactgggaggcatgagtgattgtgagggatgcccgagtggcatgagtggttgtgaggtatgcccgagaggcatgagtgactgtgaggtttgccggaggggctgtatatgagtgatgttctgcccgagaggctgtttatgattttatcactgagttgcatcgcattggcatgcacgcataacatacatagagatgtattttccttatgctgtacaacatcatatcattcatgatttctcacacattttgacagatgggcatagtgatgcatggttggactcgtggttgaatgggggttcggattttgtgagttttatcggattctgagacatgggccccacaggtatttttggggcgtaattttggatttttggaaaacattagtattttgatatgaaattaattcccataatatttgtgagctaaatcaaattaattgtgactagtttcgagccgtttggaagttgatacgcgcataatggaatttctggagcattccttagcttgctcgacattgggtttggcttgtttgaggtaagcaactcttctaatgttggagctgagggtatgaaccctgaatatatgtattatgtaaatcgttgggaggtgacgcacatgctaggtgacgggcgtgtgggcgtgcactatagaaattgtgacataattgtttctggaattttgtagttaaataatcttggcattttccatgcagttttatgagttaaagaaattgagctgaaaaacatattaaaaatcatgttgaggttatgtgccagtattattgggacccacaaaggtcatattgctgtgaattgttgtgttaaattgaaaattcatattcagtcatattcatttcattgcatatcatatctcagtctctgttgttatttattggtacatcatatcatcattttttggctatttttcatgatattgtgagcccgagagactggagagattgatgactgagtgaggccgagggcctgattgtgaggattagtgtggatcggggctgcccgcctgcaacatactttattattatagcacgtgagttgtccgtgcagattatagtgcttggtctgaaggagcccctccggagtctgtacacacccctagtgagcacaagtacctactgagtgcgagtgccgagtgctgagtgactaggaggcatgagtgattgtgagcgatgccctagtggcatgagtgattgtgaggtatgtccgagaggcatgagtgactgtgaggtttgcccgaggagctgtatatgagtgatgttctcccgaggggctgtttatgattttatcactgagtttcatcgcattgtcatgcacacatgacttacaggcataaagatgtattttcctcatgttgtacaacatcatatcattcatgatttctcacacattttgacagatgggcatagtgatgcatttgttttacacaggctatccgaaaggaaaatgaaacatcttatttattattgaaaagattttgggagaaatttattgttttcaaactattcacatttttggcaacttcggcaacgatttgggtttttcactgatgtatttgaaagaaagaactatattgttttgaaatcatgatttggctgagcattttatctctgtatttcttctagtattatttcctttaagttgttatggactgttgtggactattggttttggacccgaccctggtagaagctcgtcactactttcaacttaaggcttggtttgttacttacttagtacatggggtcggttgtactgatactacacttctgcatattgcgtgcagatgttggttgttgttgttgctgtgctcgatggttgtaggattgaagatgtacctgcgttcctgttgtagttgcctcttgttcatggtagccttagatttataaaagctttgtttatgtattattcaaacagactatgtatttatttcatctccactttgtatactctattcttagaagctaatgatttgtactaccagttcttggggattgtataagattaagatctttatttacttaaattactttaataatggttattggaattggataatnnnnnnnnnnnnnnnnnnnnnnnnnnnnnnnnnnnnnnnnnnnnnnnnnnnnnnnnnnnnnnnnnnnnnnnnnnnnnnnnnnnnnnnnnnnnnnnnnnnnnnnnnnnnnnnnnnnnnnnnnnnnnnnnnnnnnnnnnnnnnnnnnnnnnnnnnnnnnnnnnnnnnnnnnnnnnnnnnnnntacctaacgggttgggttaggtgccatcacgactagttggattttgggtcgtgacacacgcccacacgcctgtcacctagcatatgcatcacctccaaacaattcatataacacgtagaatcatagttcataccctcagctccaagattagagatgttatttaccttgagcaagccaaatttaataccgagcaagttgtacaatactccgaaaattccattatgtgcgtatcaacctccatacgccttcctatctccccaattcaagccaaacaattcgtatctattcaaacaacgtgcaaattaatcacaatttactctaatgcttacaatttaataaattacaaaaatttccaactccgctcgaaaaattgatagtgggctccacgtcttgaaatccaacgaaactcacaaaattcgataacccattcaattacgagtccaaccatactaattttactcaaatccgactccgaatcgatgttcaaatttcgaaaattcattttatggaattgtagaaaattcctccgatttctcttgaaaaatcaataatctaacgccaaaaacgaagattaattcatggaatataatcacaagggagtcaataacaattaccccaagttgtgtggtgaaatttgcctctgaaaatcgcccaaaccgagctccccaattctgttttcgtcaaaaatggaaaaacctcccatttatagggatttttagtgttcgagcaccacaggtggcgcggggcgccacatgtggcacagggcgccacatgtggcacagtttccagcatcccaaaaattcccagcaccagggctagcgccccacgcaaccctgggcgatggtggcgacggaatattgttcccgatatggaaatgggcataactctctcatacgatgtctgaattcaacgattctttttgctatggatccataatttcagtatggatataatgaatttggagctcatttgattaatatgataccacttatgcttgaagaaatgacgtcgaaacattctggaaatatccaaattaaatttcgttaaccatccgaaatccacccgaggccctcgggacctcaaccaaatataccaacaagtcctaaaacatcatacgaacttagtcgatgcctcaaatcacatcaaacaatactaaaaccatgaatcataccccaattaaagattaataaactttaaatctcttaactttcaaacctcgcgccaaaatatatcaaatcaatccggaatgaactcaaattttgcgtacaagacataaatgacataacgaagctattccaatttttataatatgattccaacctcgatatcataaagtcaactccccggtcaaactttcaaactttaaatttcctatttttgccatttcaaggcaatcttaactacggacttcaaaatgaatatctggacacacgcctaagtccaacatcaccatacggatctattgaaaccatcaaaactccattccggagtcgtttgcacaaaaagtcaaattggtcaactcttctcatttaagcttctaaataaggattgctctttcaattaaatcctgaatcatccgaaaaccaatgccggcaattcacacaagtcataatacgcattacaaaggtgctcaagactttaaattgtcgaaaggagcgtagatgttcaaaacgacaagtcaggtcgttacataagtatatgagtaattttacacacacaaacacatatgcacacacatacattatattgtaattgatgatcaatcacatacattactacgtacgaaaactttatcaattgatgaattgataaaccaatatnnnnnnnnnnnnnnnnnnnnnnnnnnnnnnnnnnnnnnnnnnnnnnnnnnnnnnnnnnnnnnnnnnnnnnnnnnnnnnnnnnnnnnnnnnnnnnnnnnnnnnnnnnnnnnnnnnnnnnnnnnnnnnnnnnnnnnnnnnnnnnnnnnnnnnnnnnnnnnnnnnnnnnnnnnnnnnnnnnnnnnnnnnnnnnnnnnnnnnnnnnnnnnnnnnnnnnnnnnnnnnnnnnnnnnnnnnnnnnnnnnnnnnnnnnnnnnnnnnnnnnnnnnnnnnnnnnnnnnnnnnnnnnnnnnnnnnnnnnnnnnnnnnnnnnnnnnnnnnnnnnnnnnnnnnnnnnnnnnnnnnnnnnnnnnnnnnnnnnnnnnnnnnnnnnnnnnnnnnnnnnnnnnnnnnnnnnnnnnnnnnnnnnnnnnnnnnnnnnnnnnnnnnnnnnnnnnnnnnnnnnnnnnnnnnnnnnnnnnnnnnnnnnnnnnnnnnnnnnnnnnnnnnnnnnnnnnnnnnnnnnnnnnnnnnnnnnnnnnnnnnnnnnnnnnnnnnnnnnnnnnnnnnnnnnnnnnnnnnnnnnnnnnnnnnnnnnnnnnnnnnnnnnnnnnnnnnnnnnnnnnnnnnnnnnnnnnnnnnnnnnnnnnnnnnnnnnnnnnnnnnnnnnnnnnnnnnnnnnnnnnnnnnnnnnnnnnnnnnnnnnnnnnnnnnnnnnnnnnnnnnnnnnnnnnnnnnnnnnnnnnnnnnnnnnnnnnnnnnnnnnnnnnnnnnnnnnnnnnnnnnnnnnnnnnnnnnnnnnnnnnnnnnnnnnnnnnnnnnnnnnnnnnnnnnnnnnnnnnnnnnnnnnnnnnnnnnnnnnnnnnnnnnnnnnnnnnnnnnnnnnnnnnnnnnnnnnnnnnnnnnnnnnnnnnnnnnnnnnnnnnnnnnnnnatattttaaatatgtttagtcgattgttattgtcacgacccaaaaatcacacatgtcgtgatggcgcctatcccgatactaggcaaaccgacaacatcaataacccacaattttttttaaatattggaaacataataattaatttaaggggaaaaatcccaccaataccgaatataaatttactcccaaaatccggtgtcactgagtacatgagcatctatacattacaagtctggaaaatacggtccataatagtctaagaccaaatacagtaaacaaggagataggggaggagagacaaggtttgtgaaacatggcagctacctctcagtctccgaaaaatcaactgtgtgaaaataatcaacacccactgtgtccgggatcacctggatctgcacacgaagtgcatggtatagtatgagtacaaccaactcagtaagtaacaataataaataaagaactgaaagtagtaacgagcttctcagctaagtccaaacacagcactttccaatataaaagggtaggcatgctttcaagttcaacatttaaaactctacagtaatttcatatcaaattttgactaaaacagaaaataaagttttttccaaaatttccaaaatagtgatatatgacagttgagatgcaacaaataatgaaatcaatgcatcctttcagagtaacagtcacggagtcctcacattcactccaacctcacagtcactctttcctcgcagtcactctttcctctcaatcacttagcactcgacactagcactcagtaggtacctgcgctcactgggggtgtgtacagactctggaggggctccttcatcccaagcactataacaagacaatcatggcataaatcaatgaaacatgatgcgacgtgcagcccggtcccatacatatcctcacaattaggccctcgacctcactcagtcatcaacctctatagtctctcgggctcaagatgtcataaacattagcccaaaaatgataatatgatgtatcaataaatagcaacacggactgagatatgatatgaaatgaatgaacatgacttagtgtgaaattacaatttgaacatataattcaaccacagaaaataaccccagtgggtaccaataataacaacatatgcctaagcatgatttttattacgagtctcagctcaattttctctaatacgtagagaatgtacggatattaacatataattcaactacacagttccatggaatttgaccaagtcataattcctatggtgcacgcccacacgcccatcacctggcatgtgcgtcacctcaaaaccaatcacataacacgtaattcggggtttcataccctcaggaccaaatttagaattgttacttacctcaaaccgtgtaattctttattccactatgtccttgccatgagaattggtctccgaaagcctcgtatctatccacaattaattcaattcagtcaataccaattattgtaattaattccataaggaaatactaattttccaataaaaatccgaaattaactcaaactttgcttgtggggcccacgtatcggaacccgacaaaagatacaaaatatgaacgcccatccaaccacgagtccaaccatacaaatttcaccaaattccgatatcaactcgaacttcaaatcttcaactaaagtctttgaagatttctaccattttctacccaatctttacccatttaaactcaacaatatttccacaaaccttattggtatgtgtatgtataaataatactcttacagtcaagaatcatactcccaataacccatctttacccaaactcgaaattgaagaattgggggaagaaattcttacctctttgaagccctagtaagatccttgtgaaatcttcaagtcttgaacaagaattgatgaataattgactaggtcttcactttttctctctaagatgctctcaccactctctaaaatatcagagttttgctccaaaagagtctctttgcctcaatatattgaaatagggtcggatcaaaaattaaaaaaattgaagcgccgacactaatctgtggtcgcatatgcgaccgcataatgcttctgcggccagcataatgcgccgcaaacctggtctccaaatctgcctcacctgcttcactctgctgccattatgcggtccgcagagtgattctgcgaccgcatagtgggccgcaaaaatgttttcttctaccaaaaatatttctttaccccctagtgcattgttcaacccgaaaagtttggcaccataaaaccttaatttcctttgtactaatttcctttctataacctttgtactaattgatctacctcgacaccacaaaaccttaatttccttagaaaaaattctccggggtcattacacataagtcaacatccggttaaccttttcaacttaagttctaaatcttggaactaagtgttccaaatcattccaaaacctcactggacccgaaccaattacccccggcaagttacataacaaatgtaaagcataaattgagcagtaaatgagggaacggggttgtaatactcaaaacgaccggccgggtcgttattgttatattattaactcatttacttaatgttaataacttctttcatttctttaatttgtgatccatatatacatgtcacatatttttagtattaattcttctatattttattcattcatcaccaataatacattacatagattaatcgatataggtcgagacattttatttttaatattcatcgatataggtcgagacgttttgtttttaatattcatcgatacatctaagttagttatatgtcgatgaatcaatttacaaatagatatattggatgatgatcaattatatatactaattagattattgcttcttcacaagtctttccccaaaagaacccgaccctgtggccctaacgtttcgtgttcttagatgcggctatacctatatatatatatatatatatatacacacacacacacttcgttgtactactttaactatatatagcttgttatagtatatgttagtgtattnnnnnnnnnnnnnnnnnnnnnnnnnnnnnnnnnnnnnnnnnnnnnnnnnnnnnnnnnnnnnnnnnnnnnnnnnnnnnnnnnnnnnnnnnnnnnnnnnnnnnnnnnnnnnnnnnnnnnnnnnnnnnnnnnnnnnnnnnnnnnnnnnnnnnnnnnnnnnnnnnnnnnnnnnnnnnnnnnnnnnnnnnnnnnnnnnnnnnnnnnnnnnnnnnnnnnnnnnnnnnnnnnnnnnnnnnnnnnnnnnnnnnnnnnnnnnnnnnnnnnnnnnnnnnnnnnnnnnnnnnnnnnnnnnnnnnnnnnnnnnnnnnnnnnnnnnnnnnnnnnnnnnnnnnnnnnnnnnnnnnnnnnnnnnnnnnnnnnnnnnnnnnnnnnnnnnnnnnnnnnnnnnnnnnnnnnnnnnnnnnnnnnnnnnnnnnnnnnnnnnnnnnnnnnnnnnnnnnnnnnnnnnnnnnnnnnnnnnnnnnnnnnnnnnnnnnnnnnnnnnnnnnnnnnnnnnnnnnnnnnnnnnnnnnnnnnnnnnnnnnnnnnnnnnnnnnnnnnnnnnnnnnnnnnnnnnnnnnnnnnnnnnnnnnnnnnnnnnnnnnnnnnnnnnnnnnnnnnnnnnnnnnnnnnnnnnnnnnnnnnnnnnnnnnnnnnnnnnnnnnnnnnnnnnnnnnnnnnnnnnnnnnnnnnnnnnnnnnnnnnnnnnnnnnnnnnnnnnnnnnnnnnnnnnnnnnnnnnnnnnnnnnnnnnnnnnnnnnnnnnnnnnnnnnnnnnnnnnnnnnnnnnnnnnnnnnnnnnnnnnnnnnnnnnnnnnnnnnnnnnnnnnnnnnnnnnnnnnnnnnnnnnnnnnnnnnnnnnnnnnnnnnnnnnnnnnnnnnnnnnnnnnnnnnnnnnnnnnnnnnnnnnnnnnnnnnnnnnnnnnnnnnnnnnnnnnnnnnnnnnnnnnnnnnnnnnnnnnnnnnnnnnnnnnnnnnnnnnnnnnnnnnnnnnnnnnnnnnnnnnnnnnnnnnnnnnnnnnnnnnnnnnnnnnnnnnnnnnnnnnnnnnnnnnnnnnnnnnnnnnnnnnnnnnnnnnnnnnnnnnnnnnnnnnnnnnnnnnnnnnnnnnnnnnnnnnnnnnnnnnnnnnnnnnnnnnnnnnnnnnnnnnnnnnnnnnnnnnnnnnnnnnnnnnnnnnnnnnnnnnnnnnnnnnnnnnnnnnnnnnnnnnnnnnnnnnnnnnnnnnnnnnnnnatttccagaaattacatctaccaaccaaagttggttggtaaaatattcccctacaataaccgaccgtctttggtcggtaaatttaactataaattttataaaatattttaaataataatataattattaaaatttaaaatgtggatccacattaccgaccgatgttggtcggtaatcaaaaatattctttgactaagcaagtctgaccactggggtcaaatgtttgaccaatataccgtttaaaaaaatataaaatatttttttggtagttttcgtccattgtgacagttttttggttgcttttgtggaccgagcaacgttggtcggtatcgcttggtcggtgtttcctggatttctagtagtgatatggcatgtgttacgttgttgacgtaattgtttaaccaaaaaataagatctttagtcaaagcctatttttagaagaactcgggttattattaaccaaatgattccttacttcctcagtaattcacttaaaaggaaataaagttgacaaaaagtaactaaaaagaaagaataattgattgcactgaataaacaagagaaagtgaatatatttctatagcactccgaacgtgtctttacaaatgagattctcctcccttatataggagtttaaaaatataacgtttcctcctatttatggcggaatcattatgagctttaacgacattaattgtccgttatgattggtaatcgtaactgtctatgaagattttgtaacgattctgattccccttcttcattaattgtaggtctgtgaatcttccctctttccagtcttgattcattccgctcgtgcctcttcaacaattattttaggttcgaacattgcttatccattatctcgtgggtgtttgccccgtacctcttgtggttcatacaccttttaaatgaattatgtcagttgtcatttccttattgttctacgtatcatgctctgtcagctaaatataattccacgtgtatcatttatttaccaccaataaagatagtcgccccactttctgaatattctacaattgtatgttcggtaagtggtaagtatttatggcaggaattctttgccgccatttcccaagcatcattgtgctttcttcaaaattaacgtgtcgtatgtcacttccatttaatgcatatgccacgtgattttgatgattgtttctgtggcttctcagtgtttttaggacttttcatacttcttaggttttatgaaacctttattctacagtgttcttcttcttcattcttcctttttttgacgcatatccctctgttaattccttatacaaccatgtattcatcaactcctgaccctcgcaaagtcgtaattgttgatgaacttgctccttcatctgcttctgtgagaagtagaagaggtggcagacttcatagtttaggttcgctgtccactcgtggttcttcatctcaaaccactaccctcacttcttcttattctaaacctagggcttctttaacccctagatcttcttctagaaatagggaatcgagtgagtctatacgtgaaccaacggttgatgaaattgttccacatcaattttctttctcatctgatcgagaaaccataagaatcaagtttcttctttagcttcttatggtcgtgccgatctttatcctactcaaattaccactggtttaatttctcttgttcgaagagaatgtaaatagaaacctgacttcctagttttagttcctgatccaaaccaaagaataacctacaatcaggctggttattcctttatttatacatatcctttcactttaggatttagaccacccattgacccagtaatcattgagttcttccgcttttttaatgtatgcctgggacaaattggtcccattgtttggagggttgttgcatgccttcattacctatctaacttggcttccttgcctttcacctttcatcatttgcttcatctttattccctcaaattatttcatgaaggggtgttttcacttgtggccagaagcaagagggtattggttatccctgaggataatagagatcgtggttggtatgctcgctttgtagctgctcccacaagtgcattggtaggtaatgagaatatgccctttctagaaaagtggaattttgcacgtaagcgtttttcctttaccttttcttttctttcttgaaacaagaaacttttaatctcgtgtctactttttcagcaaccatggaagttttcgaggagattcctaacttccgtgcttgggtagaaaagttattgtcagttgcccctatggagagtaggtcttggaagtacctttctcaaaggtttggttggaaagttaaaacacacggtaccttttctgttcaatttctcttcttctcttgtgttggcttaggagcttcttaccaaacttctctcttttgttaggattttctattcgtggtgtcagtcccgcgtctatttcttctacaagactttctgtatctcttgctcaagagagaattttgagctcttcatcgaaaagaaaagtgaatggttctcgtggatctgagggtggagaagaataggaagagggttctttagtgcgcatgcctcgggttaggaggcgcattatttccgatgatgaagctacccatcctccaagttcaatcccttcgagacttttagatgagcccgaaagtgctacattagtgatttccgatgaagagatgaatactcgtccttgtgattctgctgatcagttgtttacccgtggttttgataatgaagcctttggtcccgtttctgaagagttgcctctagcctctcttctagtgttagtccttgttcgttctaaagctcccctacatgaagttgctgctactgctccctccgtgactgcttccaccttctctactattccagttgctactacttctcatgcagaagttgggccttctagtagcaataaagcgatgaagaagattatcattgaggttcctgagagtgggaactnnnnnnnnnnnnnnnnnnnnnnnnnnnnnnnnnnnnnnnnnnnnnnnnnnnnnnnnnnnnnnnnnnnnnnnnnnnnnnnnnnnnnnnnnnnnnnnnnnnnnnnnnnnnnnnnnnnnnnnnnnnnnnnnnnnnnnnnnnnnnnnnnnnnnnnnnnnnnnnnnnnnnnnnnnnnnnnnnnnnnnnnnnnnnnnnnnnnnnnnnnnnnnnnnnnnnnnnnnnnnnnnnnnnnnnnnnnnnnnnnnnnnnnnnnnnnnnnnnnnnnnnnnnnnnnnnnnnnnnnnnnnnnnnnnnnnnnnnnnnnnnnnnnnnnnnnnnnnnnnnnnnnnnnnnnnnnnnnnnnnnnnnnnnnnnnnnnnnnnnnnnnnnnnnnnnnnnnnnnnnnnnnnnnnnnnnnnnnnnnnnnnnnnnnnnnnnnnnnnnnnnnnnnnnnnnnnnnnnnnnnnnnnnnnnnnnnnnnnnnnnnnnnnnnnnnnnnnnnnnnnnnnnnnnnnnnnnnnnnnnnnnnnnnnnnnnnnnnnnnnnnnnnnnnnnnnnnnnnnnnnnnnnnnnnnnnnnnnnnnnnnnnnnnnnnnnnnnnnnnnnnnnnnnnnnnnnnnnnnnnnnnnnnnnnnnnnnnnnnnnnnnnnnnnnnnnnnnnnnnnnnnnnnnnnnnnnnnnnnnnnnnnnnnnnnnnnnnnnnnnnnnnnnnnntagagtaggaaacattggagagtcacgactcattaacttggatgaatgatattgttcattcatctatgaaggttcgagttttaactttacttcttttcttttccttgttgttttcttttatttaaccacaactcccttcctttattttttagatcaatctgataggcacgaagcttatgaaaaggattgttcataccgagcaacaagtcattgattaccttaccgaagctgacaactggaaggagcaatttgagggtctttaactggagaaggacgttttggttgaagagaagaatgccttggagcaacaagcgaagatggttgcggctgagttagcaattgaaaaggcatcttcaagtcaagttggtaaagacaagtatatccttgagtcttcattcgttgagcagctttcgaaagccactgaagagataaggggcctgaaggaacttcttaaccagaaagagacttaatgccggagagttaattcaattacttacacaaactcaagaagatctccatgcctcttctgataagatcaagttcttggagagttatcttgcccctttgaagactgcctttgatgtttccaaagttgagaaagaagagctgaggttgatgttcccgaaggtgacgatcctattcctggtgaagttagtgctcaagcccctactccccaagctgaatcttctcctgttgctgatgatgccaccttggatgctgccccttagttttatttgaaactttttgatgcgaagtttttttttctttttggaatggatgttagtttttacccctatcttgttttggagtttgataacaaacaagtaccttagttttggctaagtttaatatataaatctttgtttattttgatgttgagtttttgttttactctttggcttttaaacctgcatttaaaatgctttaatattttgttattttgatagacacgaatttttataaaagagggcccttttataaacaacactaatgaagaagatgtctcaacttcatattggtgtaaatatatgaaagtaatagaaaaaggaatattttgaggaagtttcatgaataatttgaggaagtttcatgctttgaactttcaaattttatataacacttttcatgtatacaaataacattttgtacaatatctacacttctttcataactattttctttgtaacaagtttcaaaattttgggtctattgagtaacccgtgactaattattgcccttaacctataaactcgtaggaacttgaaatgcagcttgtgtccatcttgtatctttcccgtgagtttataccttatcaaggctacttcaaagttttttgagtcaggcttgttttttggctcttgattagctcttgacttttgacttttgggctgattcaggcttgaattatgacttttagtcttctttgcctttttatatacagttccccaagtgttagatctttgaagtataaaatctcgagcacttgattgttcctttaatttggtccatttcctgaaaaggaaaatacatacgggactcagaggtatacatttagatgatgactgctaaaccctttttatttccatcagaaaggttgtaacctagacagggaataattctgtattccgcatgtctttcgggtctaatgttatcatttggtatgggctagcttttagcctatcatctaaaattgttagtataatttaaaagaacaaaataaaatcacagttgagcgatacctgatcgtgggtattttctttgcctagaagtaatacttctttaaatgaagaacattccaattcgacagtagtaccttcccttccatggtttccaacttataagccctttttccagcgatgcttcaaatcttgtaaggaccttcctaatttggacacaacttccctgaaccagttgcttttgttgtttgaaaaacctttttgagaacaaagtccccaatcttgaagtatctaagatgagcttttatgttgtagtatcgctcaataatttgcatctgagctgccattcttattagagtcgcttctctcttttcctcgagtaaatctaaattctttctcatctcttcaccatttgattgatcaattgcttgtgtaaatctcgtacttggctcacctatttcaactggaattaaggattcagcaccataaacaagtaaaaatggagtctctctcgtgcctgtctttgttgtcgttcgataagcccataatactcctggtagcacctcaggccacctgccttttgattcctctaatctcttcttcaaattattaataataaccttatttgttgattcaacttgtccattggccacatgatgataaggtgaggaagttatttaattaatctgctaactctgaaaattttttgtgactttcgtgcctatgaactgtgggccattatcacatacgatttctcttggcactccaaatcggcatataatgtttcgccaaataaagtccatgatttccttctctcgtacctgtttgaaggctcctgcctctacccatttggaaaaataatctattaatactaacaaaaatcgtacctttcctttagcttgtggcaatgatcccatgatatccatcccccacttcatgaatagccatgggaaaataaccgtatgtaatagctctgttgggtaatgcatgttattgccatatcattggcatttatcacactttgccacaaaactttctgcatcttcttccattttctgccagtagtatcctgctctaattaaagtctttagcaaggatcttcctcctgcgtgatttccacaatgtcccccgtgtacttctctcatcacatattttttctgagcaggtcccaggcatcttgctaaaggttctctgaatatttttcgatataaatttcctcgaattaagcagtaacgtgaagcttttcatagaagtaactgagactctttcttgtcttcagttaaggttccatacttcagaaaattaacaaattcgtttctccagtcccaagttaaattattgaaatttacctcatttttatcttggtcgagtgctgaatgaaacaaatgtattacgatagcgttttttgcatttgttatttccgcaactgacacgagatttgctagtgcatatgcttccgcattctcttccctgggtatttgcacaattttccatgtctgaaattgtcttatcaattctcgtgccttttccaaatattgctgcatgcgtgcctctctagctatataagtcccctgcatctggttaactaccagctgggaatcacttttaattatcattttctctatagccaattctcgtccgagttctaaacctacaattatagcctcatactttgattcattattagtaattggatagcattttattgcttgtcttatactttttcccaaaggtaggattaaaacaatacctaaacctgctcctttaacattagaggaaccataagtaaatagagtccatgtacctggattagatccagtgaatacctgtagttccttttctttttcaggaactatttctgtgctaaaatccgctacaaaatttgctaaaatttgtgattttattaccgttctaggttggtacataatattatattcactgagttctatagcccatttagctaatctttctgacaattcttgtttatgtagtatactccttagagggtaagcaattattatagagatatgatgacattgaaaataaggtctcaactttctagatggcataactaatgctaaagtaagtttttctaagtgatgatatcgagtctcagcatctaacaaagatttactaacataataaattgaagattgtttacctttatcttctcgtactaaaaccgcacttaccgccatttctaatactgcgagatagatgagtagcctctcttcatcctttggcttagctagcaggggtagatttgacaaatatgcttttaaaattttaagggcttgttgacattcatcagtccactcaaattgatttttctttttcaatactgaaaagaatttaaaacttttctccgaaaatttggaaataaatcttcccaaagctgctattctccctgtcagcctttgtaccttatttttgctcgtgagtatatctggaattttttcaatggctttgatctgcgcaggattcacttcaatacctctgttagatacaagaaaatctataaacttacctgaagccacgctgaaggcacattttttttggatttaatttcatattatttttgcgaagaattccgaaggtgcttgaaaggtgttgaaagtgatctcctgctcgtgcagattgactagcatatcatcgatatagacttcaatagtctttcccgggtgttcttgaaacattgtgatcaccaatctgtgatacgtggccccagcgtttttcaaaccaaaaggcataactttgtaataataagtccccatgtgtaataaatgaagtttttttctcatctaagggatccatatttatttgattataacctgaatatgcatctaaaaaactcaaccgctcatgacatgaggtagaatcaatcaattgatctatatgtggtaaatggaatgaatcttttgggcaagctttatttaaatcagtataatctacgcaaacccgccattttctattcttttttggaagtaccacagtattagctaaccagttcgggtattttacctccagtattgaaccgatttttaaaagtttttgtacctcatcctgaatcactttatttttgaaagagccttgcttatttttcttttgattgacaaggtacgagggattttcatttagtttgtgggtcatctcctccggaggtatacctgtcatatctgaatgcgaccaggcaaaacaatccgcgttagctttaaaaaattcaactaacttacctctcatttctcggctcagcttcgctccaatataaacttttcagtctggccattgctcgaatagtacaacagcttccagttcttcaattgttgttttgatgttttcattctcctctggttcttgaatgacatcaggtctaaaatctacatctgtttgccttaagccactttcagctgagatccgatttaccatatcttcgacgggattcttgttcgtatcttcattcatcgtacgcgaatctaccactgaattgatatttttagaaacctgttgatctccacggatttgccgaattccccattgtgaaggaaacttaatgacttgatgtaacatagatggtacaacatccatgtcatgaatccatggcctcctaagaatcacattataagtcatgtccgtgtctattacttggaatttcgtatccttgataactccttctacaaatgtggtaagcactatctccccttttgtaataacggttgaattatcgaatccagataaggatcgttcttttggtactatcttgtcgcccatttgcatttcgttcaccactcttagaagaataatattcatggagctacctggatcaatcaaaactcattttacattagtattatgtataagtaaagatattaccagtgcatcattgtgagggattatcaagccacctgcatctgcatcatcaaatgttatactatcttcttccaaaacatggcgaactcgcttcccgtgggtcacagtgaactttgacgtctttttcgcagctgtgtatgttacaccattgacttcttccactccgcttatcacgctaactgttcttttttggagacggaggatttggaggttcttgtctatttttcatataagattgcttgcctttctcgctaaacaagttggttaaataatattgctttagcaaatgctctactttaccttgtaatagtctacaattcgctgttttatggccatgatcattatgaaactcgcaccagaaatctggatttcttctgcctgggtttgatctcatttactttggccaccgtaccttatctcccatattccttaaaatagctaccaactcagatgtgctaatattaaaactgtaatcaccaatccttgcattcatgtcagtatctctatcacgtacatcttgttcttttctgaacctggatgatgatctcgcatctttgttcctcgatctagggtctgaccgtacattttctggtttggaccgtgagtcccgcctcgcaggtcccatataaggctcgtaccaatttttataggaccttttttcagactctgaccgccttgaatttgttctttcatcaacccttgactgtgcgacgatgtcttcttcaatccatagcttggtgatgtacctgttatatacatcgttccatgttgtagcagggaattctcgtaagctttccttgagtcttctcgtgacttctgagctcttttcattcaaattacttgcgaacgccatggctgcccaattatcaagtactcgtggaagaatcattctttcacgttgaaatctatccacaaattccctgagtaactaagtatctccttgttttaccttaaagatatcttccatccttttttcaactttttgagctcccgaatgtgcttttatgaataaatttacaagctcagcaaaagaaccaatagaattttcaggtaaaagagaaaaccatgttaatgcccctttcgtgagtgtttctcgaatatttttgaccaaaattgactcaatttcttgtttggtcaaatcattgccttttacgcctgttgtgaatacagttacgtgatctcatgggtcagttgttccatcatattttgggatgtcaggcatttcgaacttcttaggaatgggcagtggggccgcgctcggcttccatggttgttgtgaatatttatcgatatccactcccttaatcgcaggtggtacaccaggtatttgttacatgcagtcgttttgctctttcgtctgtttctgcaaagttagtacaaaattttataaatcagagttatttggtgtacctgaactcccatcacgtgattcattgggagttcccccgcttcctgaattggcaagccccgagcatggattttctatagttgccgtattatttgggggaggagttagtggtgcagttggaaatcccctaacaaaatcttggagagcattgttcacatgttcaacgatcaattgttttaaagcatattgcttgacagtctgctcgtctccatgttgttcatttgtgtgagacgtggatctttcaggtgttccttctcgagaatgacgtggagattcctgtggtaaagaaattggaggagatcctccctcctgttggttacttatgttgacagttgacagttgacatgatttggttgtgacaaagaaggatttggaaagtaaaaagattatcaattttccggtaacggaacaaatttgtttaaccaaaaaataagatcattagtcaaaacctatttttagaagaactcgggttactgataaccaaataattcctcacttcctcagtaattcacttaaaaggaaataaagttgataaaaagtaactaaaaagatagaataattgattgcactgaataagcaagagaaagtaaatatattttgataacactccgaacgtgtctttacaaatgagattctcctcccttatataggagtttataaatataacgtttcctcctatttatggtggaatcattatgagctttaacggcattaattgtccgttatgattggtaatcataactgtctatgaagattttgtaacgattctgattccccttcttcattaattgtaggtccgtgaatcttccctctttcgagtcttgattcattccgctcgtgcctcttgagcaattgttttaggttcgaatattggttctccattatctagtgggtgtttgcctcgtacctgttacgcttcatacatcttttaaatgaaatatgtgagttgtcatttcctcattgttccacgtatcatgctctctcagctaaatataattccacgtgtataatatatttaccaccaatacattaataaatggaaatcgttgttcagatagtatattacattaaattgtaagtactatttttcaacgtatgtaaacctgtcaaacgcctttgctcctcctacgctaaactatagccaaagtattaattacttatattgctcgcaagatcaatttaagtaaatgtttatctactgcctatgagaagcagaaccaattttctaaaatctaaaaaataaaacaacaacctgttatgacaagtgcattaaaataaacgagaaagagaaattaaacacacaaagaattctaaaacttgatcttacgagttacgagctacacattaatattgcattgtaccttttgtttcttttacttaacaataaaccaagaggctaattgtcatatatatgtaagtgttagattattttcttcaggcaaaaaaactagacgttaaacatctctccacgatactttgactgtccaagttggctgtagctaagctgttaattagctcaacatttctcctctttgaactcggggcatctcccaaggaagaagatgaaagctcaatatcgagttctcgtgaacgtctccgtggcctcactctattaatctcagtaacattagattcaatcaagtgagggaaattgagtacagctcttgaaccgcgcagtttaaatgcagttctgtcataagccaatgctgcatcctcaggannnnnnnnnnnnnnnnnnnnnnnnnnnnnnnnnnnnnnnnnnnnnnnnnnnnnnnnnnnnnnnnnnnnnnnnnnnnnnnnnnnnnnnnnnnnnnnnnnnnnnnnnnnnnnnnnnnnnnnnnnnnnnnnnnnnnnnnnnnnnnnnnnnnnnnnnnnnnnnnnnnnnnnnnnnnnnnnnnnnnnnnnnnnnnnnnnnnnnnnnnnnnnnnnnnnnnnnnnnnnnnnnnnnnnnnnnnnnnnnnnnnnnnnnnnnnnnnnnnnnnnnnnnnnnnnnnnnnnnnnnnnnnnnnnnnnnnnnnnnnnnnnnnnnnnnnnnnnnnnnnnnnnnnnnnnnnnnnnnnnnnnnnnnnnnnnnnnnnnnnnnnnnnnnnnnnnnnnnnnnnnnnnnnnnnnnnnnnnnnnnnnnnnnnnnnnnnnnnnnnnnnnnnnnnnnnnnnnnnnnnnnnnnnnnnnnnnnnnnnnnnnnnnnnnnnnnnnnnnnnnnnnnnnnnnnnnnnnnnnnnnnnnnnnnnnnnnnnnnnnnnnnnnnnnnnnnnnnnnnnnnnnnnnnnnnnnnnnnnnnnnnnnnnnnnnnnnnnnnnnnnnnnnnnnnnnnnnnnnnnnnnnnnnnnnnnnnnnnnnnnnnnnnnnnnnnnnnnnnnnnnnnnnnnnnnnnnnnnnnnnnnnnnnnnnnnnnnnnnnnnnnnnnnnnnnnnnnnnnntgctgcatattttccccatggtctcctcctcactcctttgtatttcttcttttccagtggcacctctgagtttggctccttattttctgctgtctcgatatgatcttgatctgcatataaattttcttgattgtgttgtgcaaatatggtgttttcacaacttgattgtctcggtgtttggatggtgttattggatgaatttagttctgaaaagatttgggaaaagtcaggatcattgaagagatgttgcatggtgtcaagaaaattttgctgatcaaactctaatggtattccctgcatctttttttttttttttttatgttaaagttctttttgtgattgtggtgtacactttggtaatgagaattagaaaatgatgatatatatatannnnnnnnnnnnnnnnnnnnnnnnnnnnnnnnnnnnnnnnnnnnnnnnnnnnnnnnnnnnnnnnnnnnnnnnnnnnnnnnnnnnnnnnnnnnnnnnnnnnnnnnnnnnnnnnnnnnnnnnnnnnnnnnnnnnnnnnnnnnnnnnnnnnnnnnnnnnnnnnnnnnnnnnnnnnnnnnnnnnnnnnnnnnnnnnnnnnnnnnnnnnnnnnnnnnnnnnnnnnnnnnnnnnnnnnnnnnnnnnnnnnnnnnnnnnnnnnnnnnnnnnnnnnnnnnnnnnnnnnnnnnnnnnnnnnnnnnnnnnnnnnnnnnnnnnnnnnnnnnnnnnnnnnnnnnnnnnnnnnnnnnnnnnnnnnnnnnnnnnnnnnnnnnnnnnnnnnnnnnnnnnnnnnnnnnnnnnnnnnnnnnnnnnnnnnnnnnnnnnnnnnnnnnnnnnnnnnnnnnnnnnnnnnnnnnnnnnnnnnnnnnnnnnnnnnnnnnnnnnnnnnnnnnnnnnnnnnnnnnnnnnnnnnnnnnnnnnnnnnnnnnnnnnnnnnnnnnnnnnnnnnnnnnnnnnnnnnnnnnnnnnnnnnnnnnnnnnnnnnnnnnnnnnnnnnnnnnnnnnnnnnnnnnnnnnnnnnnnnnnnnnnnnnnnnnnnnnnnnnnnnnnnnnnnnnnnnnnnnnnnnnnnnnnnnnnnnnnnnnnnnnnnnnnnnnnnnnnnnnnnnnnnnnnnnnnnnnnnnnnnnnnnnnnnnnnnnnnnnnnnnnnnnnnnnnnnnnnnnnnnnnnnnnnnnnnnnnnnnnnnnnnnnnnnnnnnnnnnnnnnnnnnnnnnnnnnnnnnnnnnnnnnnnnnnnnnnnnnnnnnnnnnnnnnnnnnnnnnnnnnnnnnnnnnnnnnnnnnnnnnnnnnnnnnnnnnnnnnnnnnnnnnnnnnnnnnnnnnnnnnnnnnnnnnnnnnnnnnnnnnnnnnnnnnnnnnnnnnnnnnnnnnnnnnnnnnnnnnnnnnnnnnnnnnnnnnnnnnnnnnnnnnnnnnnnnnnnnnnnnnnnnnnnnnnnnnnnnnnnnnnnnnnnnnnnnnnnnnnnnnnnnnnnnnnnnnnnnnnnnnnnnnnnnnnnnnnnnnnnnnnnnnnnnnnnnnnnnnnnnnnnnnnnnnnnnnnnnnnnnnnnnnnnnnngagggggcctggccgtgggtcttaacattagtattattatatggtttcgtgagtaagtagttcatgaatgtgggagattaagttgtacttttctagccaccagtcaaaatcttataattaaatttggattgttttcagaaagggaattatatgagagaataggtctccaacggcaacaatgcttgaaagtgatgcctcctgtatattggtaattgtattaatattaagttgaagacattgtaaaatcggatatcacttgatctccatatcaaattaagtaatttactcttaataattctagattagaacaaagtatatatcattcaaaatatatataaccctaatgtccgaggcacctcaactaattttacgggatacatgccacctcttaccagcaacatatattagataaatatattattttacaatataattgattactgtaaacatgaagcaagaataaattctactagtatgagatatatcacgttgtatgcataaaagtctatcaccattcaaaataactttccaccttacctgataaatactaatcactcaaacaaccaagacaatgcaagtctgaaagttcatagtattaactcattttagagctaatttttctaccacttgtcatatcactctgctttttttttttttcctcatccgatattcgatatttactttggccttaattaatttggattcgtgccgcgtgaaacctctaattaaaagaaaagtgctctctactataaaaaaaaagggctcacacgtgaaacctctaattaatgatgaaataatcttattcattcccttacaactttgacagtgtcttatcaatcttaatagcatgtttggcaaagctgaaaaaatcagcttattttgataagtgcatttttcaaaagtacttctcgagaaaaatagtttgtgtttggctaatcaatttaagaagtacttttgagtagcaatttgtgtttgaccaagattttcaaaaaatacttttaagtatcaaattacgataaagacatgaagagatgtacttaatagttaaaattatataaataaataaataattataaatatttattattaaagataataattaagtttttattttatttaagtaaaatataaaactaaattgaaaagtactttatccttttaaaatgatttaactatatcaaaaaataattcaataaatatgaactcaaaagttattatatattacttaatagtttaaactaagtaagactattttggtatatacaatattttgttaagggtatttttggtagtaagaaaattcaaaactgcttctgcttccggagagaagatacttttttctgcttctcccaaaaaaataccttttttcctccaaaaagcttgaccaaacactccaagttaagaaaaaaattgcttttttttgaagaaaaaaaatatttttgacaaaaaagaaggttggccaaataggctataagccatctgttcgtcgattttgcatgaatttacgcgtttgggccactttcattcaaaaagcattttaactgctgttaagttaattctatcatgttaactttcaacctcatcccaatttttgaataatagaaatgtcaatcgttattttatataattttcttatatcataattcaaattaacataaaaatcattcatataaagaattgatgtgattttttcctttcagactacattttaaattattacctatctttgaataaagtggacatatgttgacctcaacggttattaaaactatattgtgtgaaaaacttattatgtattttttaaaattaaagtcattcacataggatatactgacccgaggttattaaggtatggccaggcccctatctgtctataaaattacccaaaagaatagtatacgaaggaagacataaatcttagcagccatgaaagtacgaagaaaaggagaactcattgattgctccatttaacatgagagaggactcctctgtcattgtacattttgaactaacaataaaaaaaggccaaaagagttcctcttgtcaaaagcgaagcggattcatgatttaaattttatgggttcaatttttaaggtttttggcattgaacccattatattcttaaagttatgggttcatatccactatttttacaattttaatgaatttctacatataaatttttacacctcatcaaaagttatggattcagttgaacccgttagttgttcactacatccacctctgcctcttacaatcacgaaaaagattaaccattttaaaaaaagaaaatgaccattctttattctaattctgaaatttacatatccatttgatcattcttcgttaaagctttaaatcataattgaaagcgtgaaatactagcatgagccaaagtagttctaagcgtccccttacaagttacatcatattagtagaaaattcaagtttgtctagtgatgtaatttacaaatccatgtgaataaaatctaagcgagacccaaacctattgtagcagccaaccaaatatagcctaataatatttggctggtaaatgtttttcaaagatgaagaaatatgcagagatcacgtttaatttttgttcttgtgatgtcactagtgacatcaagaagatgttttttcatccctaaaaatagggacttcttcatttgtaagcatccacttaacagagagaaacgtatttgtaagaaaaaatattgagagtttgagcggtattgttgcaaggatattttaaaagagagttttcttttgagtgtgtcagcctcgagaatattgtgctactcgagtgcttattcactattagaaaatgcctaaaaatcgtttgccgatttctgacggaaatctgtcgaagtgcaaaccgatattcagtaggaaatggacaaaataaaaaaatttataactgaaccgaccgaagtttgtcggtaaatttagtgccaaaaatccgaaatacaatttgcgtccgtaatttcaacattccgatcgaaatcagtgtcaaactttaacttttgtgtagaaaataaaatataaattaaataatttttgataatttccgactgaaattggtcggataattaaacctgaaaaatatttttcaatttaccgaccaatttcagtcggtattgaagtcaaacttttgatcaaacatgaataaatatataaattatttttaaattataaaaataattagaattttcgaccgaaaatctacaccccttatataatatgattcaaaatcatcagccgaaaacctacaccccttatatattccgtatgatgcacttgcatgcgttattcttatacttgagcagtagtccgttcgagaaattgagttgatcttcattggtgaaccaattctacttgaacataggataaaaacattcaattaatttatttaatttaaaactgagttgtgtgacccatgtatgttattaaaactgagttgtgtgaaaagtttattatgtttatttcgttaaggtcattcacctagaatatactgatccgaggtgacgggattttgccggacctctatctgtctataaaatcacccacgaaatatatgaaggaatcagacataaaccttaacctctaagaaaacaagaagaatgaatgaattcattctcatacaaagatatgtttgcaccatttatcacaagagaggactcctctctcattgtacattttgaactaacagcaaaaaaggtcaagatcattcattttataatcaggaaaaggattaaccattttaaaaaagaaagtgaatattctttagtttaattctgaaatgtatatgtcctcttgattattcttctttaaagctttaaatcataattgaatttaacgttaaatacttgcatgagctaaggtagttctacgcatccgcttataagttacatcatattagtgaaaatttcaattttgttgagaacaaaactaacatgccataatgaattttttaaaaagaaactactaaaaaggagcgtaagaatttcttggtccaaaattaaatgtctcttaagacaataaatggagtactaatataagcgagttctctttggttagattcttttacaagaaaaatttttggaaaaaaaaaatcaagcgggttgagtaattgtatttcgaaactaaaataaaagtaaaaatctaaaggtaaacttttctctaaactaacacgaatgccatcggaaaaatattatctaaaaaatcaatcaaaacacgcaaagtaacttctttaattatgtttcaaaaatttctttaagataatattttaaaaagaaattaaacctaatcaactagatctaaagaccatttcataggctctattagttattttctatatcttaaccactcgggacgttttgttagtgacaagttatacactgtaataggtgatggaaaattcaaaatatactgtatatcttccagaacaatcaaaacttgaaagcagtggcggcccccccggctgctgttgccccctaaatcttacggttgagtcataggcaacgaaaaacatttgaaaaaggtaatttgtctgatgtgataattcgagtggactgaagactactgctaagacttttttgtttttgttctttcgaattgatatatatgttggttttgttacttctattttccactctttcaacaaaattacctcaaactttataatattagatagtactagttttagtgtacgatgtgttccacgcgaacattgcgtcaattaataaaaaatagaaaaatatataaataatgaacaaatgtttgaaaaataacaattttagttaaaataaatgcaaataattgtttaaatgataaaaaaatattttattaacatatgtagcagttaaactcaatatatatcttctgaacatgatgatgaattaaattaaattagttgtattagtaatatatgacatataaaatcttttttaaattaccgtaaaagaaatcaatagataactttcaacttagttctagtttatgaagataaggtttcatttttttagaataaaatagataagatattaaaaatgaagttaagatatttttcacaaactatttgattttttcaagtattacaaaagagattgataaaaattagaaacatgctctacttttttaatcctacttttttcaattgtgattcgtagtttttctttaattttttggtatttatagatcttttttctatatggtgatatatatatatatatatatatatatatatatatatatatatatatatatatatatatatatatataaaaaaaaaaannnnnnnnnnnnnnnnnnnnnnnnnnnnnnnnnnnnnnnnnnnnnnnnnnnnnnnnnnnnnnnnnnnnnnnnnnnnnnnnnnnnnnnnnnnnnnnnnnnnnnnnnnnnnnnnnnnnnnnnnnnnnnnnnnnnnnnnnnnnnnnnnnnnnnnnnnnnnnnnnnnnnnnnnnnnnnnnnnnnnnnnnnnnnnnnnnnnnnnnnnnnnnnnnnnnnnnnnnnnnnnnnnnnnnnnnnnnnnnnnnnnnnnnnnnnnnnnnnnnnnnnnnnnnnnnnnnnnnnnnnnnnnnnnnnnnnnnnnnnnnnnnnnnnnnnnnnnnnnnnnnnnnnnnnnnnnnnnnnnnnnnnnnnnnnnnnnnnnnnnnnnnnnnnnnnnnnnnnnnnnnnnnnnnnnnnnnnnnnnnnnnnnnnnnnnnnnnnnnnnnnnnnnnnnnnnnnnnnnnnnnnnnnnnnnnnnnnnnnnnnnnnnnnnnnnnnnnnnnnnnnnnnnnnnnnnnnnnnnnnnnnnnnnnnnnnnnnnnnnnnnnnnnnnnnnnnnnnnnnnnnnnnnnnnnnnnnnnnnnnnnnnnnnnnnnnnnnnnnnnnnnnnnnnnnnnnnnnnnnnnnnnnnnnnnnnnnnnnnnnnnnnnnnnnnnnnnnnnnnnnnnnnnnnnnnnnnnnnnnnnnnnnnnnnnnnnnnnnnnnnnnnnnnnnnnnnnnnnnnnnnnnnnnnnnnnnnnnnnnnnnnnnnnnnnnnnnnnnnnnnnnnnnnnnnnnnnnnnnnnnnnnnnnnnnnnnnnnnnnnnnnnnnnnnnnnnnnnnnnnnnnnnnnnnnnnnnnnnnnnnnnnnnnnnnnnnnnnnnnnnnnnnnnnnnnnnnnnnnnnnnnnnnnnnnnnnnnnnnnnnnnnnnnnnnnnnnnnnnnnnnnnnnnnnnnnnnnnnnnnnnnnnnnnnnnnnnnnnnnnnnnnnnnnnnnnnnnnnnnnnnnnnnnnnnnnnnnnnnnnnnnnnnnnnnnnnnnnnnnnnnnnnnnnnnnnnnnnnnnnnnnnnnnnnnnnnnnnnnnnnnnnnnnnnnnnnnnnnnnnnnnnnnnnnnnnnnnnnnnnnnnnnnnnnnnnnnnnnnnnnnnnnnnnnnnnnnnnnnnnnnnnnnnnnnnnnnnnnnnnnnnnnnnnnnnnnnnnnnnnnnnnnnnnnnntgcatgtcatccctagtttataaaaattataggtaagctaaatgaacctattcttgtgtaaaaataattaataaatttattttcgcggagtctatattgtcttgctattacttgctatcggtacctcttttataattctctattgctatattcgatttagttttccaattatattgttttgttattacttgctatcagggattcttccatcttcttttaccgagggtctatcggaaacagtctttctgccctttcaggatagggataaggccgcgtacatcctaccgtccccaaacaccacttgtgggattagttgttgttgttgttgttcttttgttgttgttgttgttcttcttcttcttcttctttgctacatttgcccaaaggtcaaataaaattaatgaatatcctaaatttatttcagtccttgatggaactaccaattagctttaaagttttaagaatttccaatgacgaggataacttttcaaaattatagggggaacaattataacttatgtgatgacccgataggtcatttttaattttaaccttcatttatgtatttcgagatctcgaatagctccattcagcttttctcaatttgcatgctcaatccgtatctttttctggaaaacttttatatgaaaaaccatagaaagtgtgaaattttgcctttaaaactcatttgagttgatttcggtcaatgttttgagcaaattgactcggatcagtgttttggcagtttcggtgggtatgtatcgtgatttgagatttgagcgtgtgcccgaaattaaattttgaagtccctagcttggattatcgccatttgacggaaagtaaaaatttaaaggtttaaagcattcttaaatttggccataattagatttttgttaataccgggtcccgagttggattccaagagtttgatcagctgcgtaataatatttatgatttcagtacaaaatttgaagttattccgaggtgcgtaggcatattttccgttagtttttgaaaaaaagggcttgattttataaagcttgaatttataagtttgaccgatagttgactttgatgatatcaggtttggattatggttccggaaattttagtagcttcgttatgtcatttgtgacttgtacgcaaaattttgggttcattccgaattgatttgacatgtttcggcacgagttatagaattaaaaatttcataaactcataagtccgaatcaacgcacgatttgtaatttcttcattgttatgtgtgatttgagacctcgtgtaggtccgtaatatattttgagacttgttggtatgttcggacggggtctcgaggggttcgggtgagttttagagtggtttcagaccatttctaggccatttttgactgctggtttttggctacagcagtatgcatcgcagaaatttctgttgcacatggctgattttgaaagcttatatctcgtaatttgtaaggaatttggagatgatccaaaaataaaagttgtagctctttgagtctagtttccagaaatgtaaaccattgatcatttagacatttgtaaggaacgttatgatcgattaactaaagcatattactgtagttgttttgcctggcagtgtgcatcgcataaatttctgctacacaggggtgactttggaagcttatatcttataatctgtaaggaatttggagatgaaccaaaaataaaagttgtagctctttgagtctagtttccaaaaatataaaccattcatcatttagacatttgtatagaaagttatgatcgactaactgaagcatgttactgcagttgttttgcctgacagtgtgcatcgctgaaatttttgctacacagggctgactttagaaacttatatctcataatctctaaagaattaagagctgatctaaaaatgaaacttgtacttctttgaacctagtttccataaaggtaaactatgtatcatttggacatttgtacaaaaagatatgatcgatttactgaaagctggtactgcaaatgtttgcctggcaataatgagacaagtcgcatttcacacatgcgacttgcctggacaaaatgtataagtccgtagttcgatatttttgatcatttttagagctttagacctcagttttgggtatgtgttccttatcataaatcatttatatttcatgattccatgcttatttacatcatgaatccataaatttaattgaataaaatagttttttttgtaaaatctttcaaaaatgaaaaatgaagatttgaaaggtgatccgatatcggaattcgataatttttgaatggttgaactcgtatcggaataggtgtttggattttgtgaatttttgttggttccgaaaagtgggccccgcgttgactttcagttgacttttagaacaaaattgaaaatcgacatattattatccgaaattattttctataaatttaattaatttataaaaatattttgattagattagagctgtctgaacggcgttttgcgcaagtaggctattttgggatatcggcctaactccgttaaggtaagtgtcttgtctaactttgtgggaggggggaggggggggaggggggaaccaccccttaggatttgagatgattgtgtcattcgtgttatgtgaaggtcatgtacgtggggtgacgagtgggtacatgagctatatgagatatttgaccagtttggaccgttaagctccttttatacaattgattgtaaatattgtttcatgattatatattttgttgttaaaattgtttgtacgcactttacttgaaattgttagcccatgttccatccttgttgtcaagttcacccttatatgctaattattgattgtaatcactcgttgaatttatgttttacctgttatatgccttaattgtcaattgatgctcataaattgtgccttggcttatggattgttattttcttgctatttgactttgtaagctatcgtgtagcatttttcattagttgtgacttctttgtgtaacctcgttatctcttttgattttgtagtataccgtagtcggttgtaaattgattgcttaatttgttttgcttgaggatctggttgaacgccgcaacatatatgatttattactgtgagggatcaggttgcatgccgcaacaaatatgattattattgtgtgggatcaggttgtacgccaaaacagatatgattaatattgtatgggatcaggttgcacgctgcaacaaatgtacaaatataaaattattgtgatattaaggttaatcccaattgtgattctcatgatgcatttcatgctaggacggttactgtggtttcttaaatcacttcattgtattttgatcataattaattaaccgtcaatatattaaaaagggaacaatatggacttcttgtgtgaatcatgcatcctatgtgatatgttaagttgctgagaatatagcagaggcaaataaaaaaattttcaagttgttccccttgtgtatctttcaaacataaaactcatatcttattcggagatttactaaattaaatggtgatgatatttttactctaattaatatctcaaccttctcattattttattgtcgtgtaatttacgtgaaaaattattatttcgttttaccttaataaatttcatatttatcttgttaaaacttgattgaatgccttattttgtataaatacaatattttatcagatctcatatacttctaaactaaactcaattgatattctatttgtacaacccttccacaattttaactatttaaatcctaaattggcttaatgactcagttgatgcttcactgtatttaatttggaaattatatttaattgtgtttaaattattcattgctcatcctggttgacattgatacggaaaacacatggtagcacgagggttttgccgtgcaaaagtaattcggaaagatgtgggcacagtatgtcacatgtgtaagaattggcagccgtgaatcatgaattgagattgcgaggagtgatacctcgagtagtttatgtttaaatacatgcattaccaataatttatttgattgatttgtcatatgatttcgtgctgggacccactcatatattatttgatctctaactatgtggttgcttaattacttgattattttctcgttgctacccgtgttttcactgtttttattgttggtttgaattggaaattcttcttttattggcctgacattgatatccttttcttgttagctttatgtaaaattttgtacaggtttatatgtctggtaggtgtcttgacctggcctcatcactattctaccgagtttagacttgatacttactaggtaccgccgtggtgtactcacgctatgcttttgcacatctttttgtgcagatccaggtacctcagttttgttgataatcttgataattgattggacattgttgtggagacttaagatatacctattgtcccgtttgcaggccttaaagtcaccttctgatattttcctgcactgttgattctattctggaacatttatatttagagaattatttctagtaaactcttagagcttgtgacttgtactaccgggtttggaatattgtaggaaatttctatttcatatttaatacttgttggttgggtcaccactaattcagtaagtgttaggcttacctagtccataaaactaggtgccatcacgacatcctacagagggaaatttaggtcatgacaagttggtatcagagctctaggttcataggtgctacaagtcataaacaggtttagtagagtcttgcggatcggtacagagacgtatgtacctatcttcgagagactacaaaatctattaggaaattcactttttttattccttatcgtgcgatattgattcagcttgaagcatatatcttatattcattcacatccattcatatatgacattgcgcactcggtatcagttatgcaccaatggctcgtgatgtcgtggatagactacgagggagccagagattgtcaaacatcgtctcaacgtgtggtcccgactgaggatgcagaaggatcacttagagatttacgtaaggttgcaacagattgaggcatctggttgatgagtacaagttgtgaaggttagtattgtggatcatcagacattgtgtcctatggcttcatgccaagtgggggagtccactatagacgaacatattgctgggtcatgtgttatattagttctggcctgagatgtacatatgtggtattgaaaggttccacaaaatttgcacatgtttaaggtctgagattttgcaggtgataatattgggacttgcggtatgactgcgtccttaataatcctatattttagtatcaaaggagttagagaaacaacttcaaatttacagaaggtctattcaacgtggacgtctcagttgcggcagtatgggtgcttcagagaaagtatggtggttgatgagtttatgggctacgtggttcgtgccaagatttgtctgtactgagctttatttttgggatcgtcgtgtacaaataggggggagtattaccctaaggaagaatctaggaatatatgaagaaatggtcagctcggcggtgctgggtcagcgtagcaaataaagaaattggcctttggagagataattctccaccggtgtttgtggcaagtctatgaagagggtagaccagccaatgcaacaccacctacttgggcttagtttttagaggtgtttttgagggagtttgttccctagagtctatggaatgcgtggcgcacaaagtttgaatggctgcgttagtacaccatgatggtgttagaatatgccaccaagttcaaagagttacccatcatactcttactttggttcctacagccagatagcgagtccacagattcattaaaggactcagttatgatcttagattctgtatgactcgggggctacaagctgatacttcattatagcaagtggtggaaattgccaagatgttagaatatgtttgaggtgaggaaaaggaaactagggagaccatgaggcctcgaggttctggagaattcaatggatgctactcttcagctataactcattatggcggagactcgagcagttggtcagctcattccacgcatcagattactcaaggtgcaccagtaagttcttttactgcaccaccggcacgagattcctataatggttattctagttatccgacatagattcaatatgagcaacaaaactcgtagaggggttgttatgagtgtgatgatactaggcacatcatgagagattgtcccagactttggagagacatattacaccagagcactcaagccacgggctccattttagttgctactctacctacatattcagttaggggtggaggacaggcgggtagagggcgtcctaaaggtggaggcccgacccgttgatataattgctatgaattggctgaggctattacaccatatggtgtcgttataggtatgatttaattcataatagatgagtactattcttattttgattcgattccgattatcgaggtgagatctcctttcatgctccttatatggtgagtttgtgaatttatactctactcctatgtgtatccttgttgggagatttgatggtgttagcccatgtctatcattttgttttgtatactattaagggctatgagtccaaaagttactttttgttactcattacagtgggttttgatgtaatgttaggataattaattacaaattgtgaattatattccctaccagtatggtttttttttaaacaactataccactcgccagcacttgcctagtggctaatatataaataaaatcccaaaatgggtccaaagcttacaagatgtccaaaccaaaatagaagttgcatgaannnnnnnnnnnnnnnnnnnnnnnnnnnnnnnnnnnnnnnnnnnnnnnnnnnnnnnnnnnnnnnnnnnnnnnnnnnnnnnnnnnnnnnnnnnnnnnnnnnnnnnnnnnnnnnnnnnnnnnnnnnnnnnnnnnnnnnnnnnnnnnnnnnnnnnnnnnnnnnnnnnnnnnnnnnnnnnnnnnnnnnnnnnnnnnnnnnnnnnnnnnnnnnnnnnnnnnnnnnnnnnnnnnnnnnnnnnnnnnnnnnnnnnnnnnnnnnnnnnnnnnnnnnnnnnnnnnnnnnnnnnnnnnnnnnnnnnnnnnnnnnnnnnnnnnnnnnnnnnnnnnnnnnnnnnnnnnnnnnnnnnnnnnnnnnnnnnnnnnnnnnnnnnnnnnnnnnnnnnnnnnnnnnnnnnnnnnnnnnnnnnnnnnnnnnnnnnnnnnnnnnnnnnnnnnnnnnnnnnnnnnnnnnnnnnnnnnnnnnnnnnnnnnnnnnnnnnnnnnnnnnnnnnnnnnnnnnnnnnnnnnnnnnnnnnnnnnnnnnnnnnnnnnnnnnnnnnnnnnnnnnnnnnnnnnnnnnnnnnnnnnnnnnnnnnnnnnnnnnnnnnnnnnnnnnnnnnnaaaaagatagaaaagctaaaatctaatgaactagctattacaacatgataagtgtatgtgaatccaattgtcattggaaaataccaagcatcacctatcaagctctcactaggcgccagggtatactgtccataggctaaaatgaattccaaacatctccaccacaaagttgaagccagcatagtcttccaagtgtagctactatatgatctccatatgcagtggactgattttgtccaagtattaatcatgtgctcactcatcaaaattaatgtgtagaagaggaacctggctttaggcaggctttgcaaggcaaaagccaagcttgagctggctttagataggctttgcaaggcaaaagccaggcttgagctggctttaggcaggctttgcaagggcaaagccaggcttgagctggcgttaggtaggctttgcagggcaaaagccaggcttgagctggctttaggctggctttgcaaggcaaaagccaggcatgagctggccttaggctggctttgcaaggcaaaagccaggaatgagctggctttaagcaggctttgcaaggcaaaggctaggctttgaaattgtgcctttttgtgatcttgtaagcttagatccttccctactagaacttttaatgtagacatcattctaaacattgctaaaccatcctcaaattgagcatgaaagaatgctaataccactgagaaatgattcaacaatctccaaaaataccatatgatgggttcaacattttccttagcatttggacatatcagaagtaggataaattgtaccatcccacacctgcttattgcattttttctgtacactatcaaagcacccccagaatgagcatggaaccatgctaataccattggaaagtaccttaatagcatactgaatgagacaaagaaacatgcaggtttgtgcagagtctaatcctgtgaagccatcagtctggggttcttctctttgctatcctaaccctaaggttaggtgattgatatttgtctggattgatcaacctcctccctgcactaggcagttcagagaaagaatgttactcagatgtacctgcaaaagagaacacaatgttagctataaattccgccattgagttgccttctctgaacacatgttgaaagatcacattgaatttgtccttcatctctataattttcttcacatcctgtgcaattacccaaggaggatcccattccccttctatcgccttcttcatcactaatgaatcagtctcaagtatgagagggtgaagatcatgctccacataatattccaacccttgaagaatagccttagcttcagctaccacattagttgtcactcccaggtctactgccctagcatacaccatatcaccttcatcatccctcacacaaaagcctagggagctaggtccaggattgccctttgaagctccatcagtattacatttgtaccaaccatgaaaaggaagctgccatgttactcttgtagtgatcaatataggtttatatccttcaaagtattgaatcatgtctggccataacaatggaatattagggatccaagcatacctcacccttgccagttgatgcaatgtcctatttatctcatgaatcaccctatttgtggacactgaaccaccatgtttacctgcatttcttctcttccaaagctcccaagtgatgatagctggtactgcttgaaatagtggctttaattttggacaacactgagcataccaccaattccttataatctgcttcaattgaatcaattgcatagaaattccagcagcccccatgaacaagttccataccttagaggcagtaggagttgtgacaaatatatgcttaatggattcctcttggggctactgacaacaccaacacctagacattaccatttgcccttgcctcctccatatgttatcggtggctattttctgcctccacaatctctacaagaagaaggatatcttgaatgccaaacctttaatccacattaacttgaattcctgattaggatcagccctatgccttaatatttgccaagcactgctaacactaaacttgcctgaaggagttgccatccagtatggcctatccctatatctctcactgccttcataatgcacatttagccttatatgttctgcaattttctcattgaaggtttgatctagcaactgatcatcccatgcttccccttgccgcagttctgccacctcctaaagacctttattgattggaaagtcttcaggtaatacgtgataaagtgcacccaatccagtccaattttcatgccaaatattagttgttccactctttaattcccattcgatctcatgttctacttcttccctagcattcagcatttgtctccaaacatgagaccctcccctaaaatgcaccactattggtagctccttcttgcaatacttattccacatgaaattagaccacaaagattttgtggtcctaaacctccaccatagtttagcaaacagtgcccttgagacatcatgtaaggacctaaaacctaggcccccttcctctttaggaaggcaaagattttgccatgaagcccaatgtctgcttctcccttcttcctttttgctccaaaagaacctagcaaaagtcttatgtagacgccccatgatgctcttttggtggatcaaggactgataacatgtgaactggcatactttgcaacacactagagatgagtgttgcctttcctccaaatgacaacaactttcctttccatgaatgcaatttagccttcaccttcttgataagatcctcataatagtccttcctccttctagtgtaaaaaataggacaccctagatatgtgaaggggaatttacatcttgcaaatcctgtaatagctccaactgcctgaaataattcattagcaacctttgaatgcatgtagtatgaactcttatctttgttgatcatctgacttgatatcttctcatagtttcccaacactgccataatcttgctcaaagagggaggatgagcagatgcaaagattatcgtatcatcagcatatgccaagtggtttaaaggatcagaccacttaggcattccaaatcccacaaatgacttgtcttcaaagagcttattcaaagaccgggtgagcctggctttaggcctggcgttgccagcctatcgccaggtgagcttggcttgttgtccttcttcaccttgacttctgttgtctttgttgtgcccagctgatcattcttaatctcaactgcatcactccataagacctttgtagagtttacctcatcaagatcctcaatctgcccagaatctttaaatgtttgagatagaatctcatgacaagatttgtttgtggtcacattgagttgttttagctcctcattgctagtcccaaaccttctatgaacccagtcgattgtgggttccttaatagccctttcatcaatacattgagcactaggaacactggagttaaccttagctaattcttgatcatctttaggagttgaagactgaatcctatatggaatagggttaccattatgctcattttccaccaccttctcgactgcttccttcttcacacgcttatgttcctcttgagtattgactttcttttccttctcctggcccttcttagcttgcttttccccatgttccttcttcttaccattgctatgatcctcacctttgccttcagtaatttgtagagtaagctcatgaacttccttaacctctagtgcattaaacttgttcttggttgcaacttcctcaactttggccttccctttacccttgtcagcttcctttccttgtttgttatcaacaatgtgacccctattatctcattggtatttgttcttccttgcttgcatccattcctatttggcatgattagtagtaggcttaccaaccacctttccactagttaggacctttgttgaatttgtagcagtcccaattgcatcagaactcatcacaactgccttctccttgctttgttcctcaacacatttttcaaatctcttgtgtaattcaggatgaattacctagcattctacctcactatgcccctgtgttttgcaaggtttgcaatattttggcatataatcatacttaatcctgatccacttcaactcttctggtccagattcatcagcttcttccacaatcttaatacgacgagggaacttacttaacaggttaacttccaccttcaccttagcacaactaggtctagtaccattttgagtggctaggtctacatgtaatggattactaacagcacgagctaaggaaaatacacattccttcccaaagaaattaggaggcagttctggaaagcaaattcaagcaatggcaatgggagtctcttcatcaggtgtccaccatggattgcattttgtacaacgcatctgccacatgtctgactgagcttttaaataaaaagctggctttgaaagaagatgaacatagtcctccaataaagacagcctaatcaacacatgattatcttcaattaaaccaactgagcaatggcctttaatctcacattgaattggaatcactttacgtaattaactaataacatgcttcccatacgaaaatttcccaagaattgcaagtagaagtctttgttgtacgatagattgcttcacttcttgtttcttccacttcacaactggttctccgtgaaggaactcaactggtttcaatggtagcatagcgaaggtttgcataagggcattaatggcagtaggttttaaaagttttgagtaatccatggattggggattgttgtttgttgtcgtagataattgggcgatgggctgcactgaagctcgggcaacagtcatcacaggaggattggttgaattgggtgtcaaaatgtttgagtaatctagagtttgtggattgatagttggtgttgtttgtggttggataatgttggaggagggcagaccagccggaaaagatggcgggtcgccaggcatcgcggccattgaagctcaaactcacaacttttcgcgatgaacagtgaagcgatgctactgttcactacactgtagcagtgaaacagtagcgaaatcactgttcacgccactatttggcactattcaccatactgctttgcactgtagcggctgttcgcgcactattcaccgctacagtgacggcgaaattttgagagcaaaattctagagagaattttttagggcttcagttttacaaagagatcttgaatgactctgtgggttgcgatacgtgccagtatgggggttcattatgtgttgtgaccttgtttaagggaaattattttaaagaagaaaatggaaagatttcgattggcacgatgtgcatattacttgttattcagagctgaggatgggatcctctcattttaatatgatttgatatgtttaaatcaggctacaagccatggtgggagttatataaggacgagacccttgtgatgaaactttatgtgtttaaattctcccttatgaaattaaatttgtgctatagtactaatagggagtcatgcatgttagaattatttgataatactcgtatgtattttcctgtgcatatttaactatattcgtgttgtaattattgagttttaacctacgaggtgggtgctcaggtggcgttaaatgtgactcgttaattcgggtaaataattatgaggtcttcatgcctgtgtctcgttgttagtaaggtgaaggtttggaacgagatttttgttaacatgaggctaattggcgatgctgtaactaattaagaatacctattaagaccagagatgtggttataggcatacatatgatgtgtgcataggcacgagttgctaccgccagttgaggctaataccatgcgttgacatgaaaatcagactttttgaaaatatttggagtgtgagaaatttggttttaaagttataaatgtagataaaagaaataatctcaattgagatggtattgtcagacgtatgtcgattgcggtgacatagaatcacccacgagtatatgtgtaagagaaaaatcaacagtttgataaccttagaataattctagccatgttcgaggataaacgtttgttttagaggtagagaatgtgatgatccgataggttatttttaattttaaccttcatttatgtattccgagacctcaaatagctccatttagccttcctagatttgcgtgctcagtcggtatcttttgcggaaaaacttttatgtgaaaaaccgaaaacaatgtgaaagtttgcctttaaaactcatttgagttgacttcggtcaatgttttgagcaaacagatatagattagtgttttggcggttccaatgggtccgtatcgtgattttggatttgggagtatgcccggaatcaaattttgaagtctctagcttggattatcgccatttgacgaaaactagaaatttaaaggtttaaagaattcctaaatttggccataattgaatttttgttgatatcgagtctcgatttggattccaagagttcgatcagcttcgtaacaatatttatgacttgtttacaaactttgaagttattccgaggtgcgtaggcacgttttccgatagtttttgaaaaaaataaaaggcttgattttataaagcttgaatttatatgtttgaccgatagttgactttaatgataccgggtttgaattatggtttcggaaatttcagtagcttcgttatgtcatttaggacttgtatgaaaaatttgagtttattccaaattgatttgatatgtttcggagcgagttatagaattggaaatttcataaactcataagtctgattcgacgcgcgatttgtagtttagccattgttatgtgtgatttgataccttgagtaggtccataatatgtttttagacttgtttgtatgttcgtacggggtcccaaggggctcgggtgagtttcggagtggtttcagaccatttctagtccattttaactgctgtttgtttttgctacagtagtgtgcatcacagatatttctgctgctcagggctgactttggaagcttatatctcgtaatctgtaaggaatatggagatgattcaaaaataaaagttgtagatctttgagtctagtgttcctaaatataaaccattcatcatttagaaatttttaaagaaagttatgattgattaaccgaagcatgttattgttgttgttttgtgtggcagtgtgcatcacagaaatatctgctgcacatggctgactttggaagcttatatctcgtaatctgtaaggaatttggagatgaactaaaaataaaagttgtagtcctttgagtctaggttccagaaaggtgaattattcatcatttgaacattcctactaaaatttatgattgattaactgaagcctattactgtagttgttttgcctgacagtgtgcatcgcagaaatttctgatgcacagggctgactttgaaagcttatgtatcgtaatatgcaagaaatttggagatgattaaaacatgaaagttttagccctttgaatctagtttccaaaaggtaaaccattcataatttgaacatttgtacagaaaggtatgaccgatttactgaaggctagtagtgcaaaattttgcctggaaataatgagacaagtcgcatttcacacatgcgacttgcctggacagaatgtataagtacggagtccgatatttttgttcatttttagagtattagacctcgattttgggcgatttcagacctcgatttttgttcacaagtttgaactgggtaagtgttctttatcctaaatgatttatatttcatgattccgtacttatttacatcatgattctgtaaatttaattgaagaaaattggttttttctaaaatatttcagaaatgaaaaatgaagatttgaaaggagatccgatgtcggaattcaataatttttgtatggttgaactcgtatcagaacgtgtgttcggattccgtgaatttttgtcgggttccaaaaagtgggcctcatgttgactttaggttgacttctagaataaaattggaaatcgacgtattattatccgaaattgtttcctatgaattgtaattaatttataaaaatattttgattagattggagccgtccgaatctcgtttggcgcaagaaggctattttgggatatcggcctaactccgttaaggtaagtgtcttatctaactttgtctaggggaaacctccccttagaatttgagataattgtgtcattagtgttatgtgaaggtcgtttacgcgaggtgacgagtgggtacacgacctatatgtggtatttgaccggtttggagcattatgcttcttttatacaattgtaacgacctaacttgtcgttttaagaattaacgccctgttcagtaacttaaggtctcgagcagtttcgtaatatgtattatgacccgcgggtgtggttgagtttgattttcgaaagattccgaattatattaaaagaacaatgcttagtagaagcttaaatggaaagagttgacatgagagttgacttttgagaaaatgactccagaatggaattttgatgatgtcaatagcttcgtatggtgatttcggacgcatgcgtgtgtccggatttaggacaaatcaacacattttggcgaaagttggaaatagaaggtttttggaaagttcgaccaaaggttaaaattttgataacgaggtcggaattcaattctggaaattggaatagctttgttatatcatttatgatttgtgtgcaaaatttgaagtcattccggattgatttgatacgtttcggcgcaaaatatagaagttagaagatttgaaaactcataatatgattcgatgcgcgattcataatttcggcgttgtttggcatggtttgtagcctcgaatgagttcgtattgtattttgggacatgttggtatatttggttaaagtcccgagggcctcgggtggattttggaaggttaacagagcaatttggacttgaaggaagctgctggaaaatgacagcagctgttggaatcgcacctgcggaattatgggcgcaggtgcgaccatcgcaggagtgagtgaaggggagctgggcaaggatgatggagaaggccgcagaagcgacaacatttgagcagaagcacaagcgcaggtgcggccactatgctcgcagaagcggatgcagcacacgtgcgcattttggctcacaaaagcgaggccacagatgtggaaatatgtccgcagaagcggaaactgggcagaatattaaagacaaaaaatggtcatttcgccattttcgttttggatttttggagctcggacttgagtgattctggaggggttttttcacgacccaaactctctccgtataacgtcgtgacagcacctagtttctacgactaggtaagcctaaagaattgcggaaaataataaaacgaaaacaaaatttatcaactaactacaatagatactgaataaccaataacaatgccgctcggcatgtacaataaccaaaacactggacgtacacaactttttccaaaacctgtaatatcataagtcacaagctacaggaggaaactagtatctctatacaccggagtctaacaaaagaagtacaaaaggtaaatggcatagccgaggtctgcggacgcaacagatataccttgaagtctctgtacaacagcaagcactctcagctagtagcggggctgataaaaatcacctggatttgcacacaaaaatatgtacagaagagtagcatgagtataccacaacggtacccagtaagtgccaagcctaacctcggtagagtagggacgaggtcaggtcaggcctactggtatataataaaaaagcaggaaaatataacagtataataagagactggaatttaacaaaacaaaaacacagcggtataacaatgcaacacacggggataaacagcaggggatctcccgagataccgtcttgtggtcccaaaataaataagcagggagaactcccgaggtaccgcctcgtagtctcaaaagtaaatgtgcaaggagaactaccgtggtaccgcctcgtagtctcaaaagtaaatatacagggagaactcctgaggaaccacctcgtagtctcaaaagtaaatgtgcagggagaactcccgaggtaccgcctcgtagtctcaaaagtaaatatgcagggagaactcccgaggnnnnnnnnnnnnnnnnnnnnnnnnnnnnnnnnnnnnnnnnnnnnnnnnnnnnnnnnnnnnnnnnnnnnnnnnnnnnnnnnnnnnnnnnnnnnnnnnnnnnnnnnnnnnnnnnnnnnnnnnnnnnnnnnnnnnnnnnnnnnnnnnnnnnnnnnnnnnnnnnnnnnnnnnnnnnnnnnnnnnnnnnnnnnnnnnnnnnnnnnnnnnnnnnnnnnnnnnnnnnnnnnnnnnnnnnnnnnnnnnnnnnnnnnnnnnnnnnnnnnnnnnnnnnnnnnnnnnnnnnnnnnnnnnnnnnnnnnnnnnnnnnnnnnnnnnnnnnnnnnnnnnnnnnnnnnnnnnnnnnnnnnnnnnnnnnnnnnnnnnnnnnnnnnnnnnnnnnnnnnnnnnnnnnnnnnnnnnnnnnnnnnnnnnnnnnnnnnnnnnnnnnnnnnnnnnnnnnnnnnnnnnnnnnnnnnnnnnnnnnnnnnnnnnnnnnnnnnnnnnnnnnnnnnnnnnnnnnnnnnnnnnnnnnnnnnnnnnnnnnnnnnnnnnnnnnnnnnnnnnnnnnnnnnnnnnnnnnnnnnnnnnnnnnnnnnnnnnnnnnnnnnnnnnnnnnnnnnnnnnnnnnnnnnnnnnnnnnnnnnnnnnnnnnnnnnnnnnnnnnnnnnnnnnnnnnnnnnnnnnnnnnnnnnnnnnnnnnnnnnnnnnnnnnnnnnnnnnnnnnnnnnnnnnnnnnnnnnnnnnnnnnnnnnnnnnnnnnnnnnnnnnnnnnnnnnnnnnnnnnnnnnnnnnnnnnnnnnnnnnnnnnnnnnnnnnnnnnnnnnnnnnnnnnnnnnnnnnnnnnnnnnnnnnnnnnnnnnnnnnnnnnnnnnnnnnnnnnnnnnnnnnnnnnnnnnnnnnnnnnnnnnnnnnnnnnnnnnnnnnnnnnnnnnnnnnnnnnnnnnnnnnnnnnnnnnnnnnnnnnnnnnnnnnnnnnnnnnnnnnnnnnnnnnnnnnnnnnnnnnnnnnnnnnnnnnnnnnnnnnnnnnnnnnnnnnnnnnnnnnnnnnnnnnnnnnnnnnnnnnnnnnnnnnnnnnnnnnnnnnnnnnnnnnnnnnnnnnnnnnnnnnnnnnnnnnnnnnnnnnnnnnnnnnnnnnnnnnnnnnnnnnnnnnnnnnnnnnnnnnnnnnnnnnnnnnnnnnnnnnnnnnnnnnnnnnnnnnnnnnnnnnnnnnnnnnnnnnnnnnnnnnnnnnnnnnnnnnnnnnnnnnnnnnnnnnttcaaaagtaaatatgcaaggagaactcccgaggaaccgcctcgtagtctcaaaagtaaatatgtagggagaactcccaaagaaccgcctcgtagtctcaaaagtaaacacacagctcaatcgataaatagcatagttaacaccaagaattctacagttaagactgataaagagcaaggaaaagcaggaaatcaactaggcatgcttcacagagttcaaataagcagttgaaacacgtagacatacgatattagactaaacaggataactacacatgttggaatagctcaaataagaatgaaaatagactaatactcatttaaacaatataactcatattaaaggaaaaacaggttgctactcagtaaaataaatcggattctacaacaaatagcctgtgtacgtactcgtcacctcacgtacacggcgctcacatatcacaacagtaccaaatcctaaggggatttccccccacataaggttaggcaaaccacttacctcaaaccaagctcaatcaatcggtaacaatgccttttccacgaatatccgactccgaatggcccaaatctagccaaaagaaattacatatcataaatacaactataataaaataatctaattaatgaaaccaaaactttaacaacaatttcaaaaatcgtcccagaaagtcgacccaggcccacgtctcgaaatcgggaaaaaatcacaaaatccaaaaatccattcactcacgagtccaaccataccaaatttatcaaaatccgacctcaaatggccactcaaaacccaaatccaactcttcaaatccccatcctcaaactcccaaattccaccttaaatacacactaactaggttgaaaaataaatgggaaagcaagattattgataaaaaataagcacaagggacttacctcaagaaatatctcgaaaatgctcccaaaaattgccctataccgagtttgcaaagtccaaaatgacaaaaatcacgaagcccttcggttttaaacactgcccaggcatttccgcacctgtggatcctgggctcgcacctgcgcgtgcgcttgtgcgaaaaatgagagtttctgcgcaaaccacttattcccctctgcctctgcacctgcgatgaaggggccgcacctgcgcgtgtgcgcctgcggggtcctgtctgcttctgcggtcttagttcgcacctacggtcatccttgcgcatctgcgggcatcacagatatgtccttttccaagaacctgcgacccctgaccaatccacccaactccgcttctgcgccatattgctcgcacctgcgggctcgcacccgcggtcagccttacgtaggtgcgattacacaagaacctgcccagcaccagaaaatctcctaagtccaaaatgacccgttaaccatccgaaactcacccgaggccccccgggacctcaaccaattatatcaaccagtcctaaaatatcacacggacttagttgggcctttaaatctcatcgaacaacgctaaaaatatgaattacgcatcgattcaagcctaatgaacttccaagtttcaaacttctacatacgacgccgaaacctatcaaatcaagttcgattgaccttaaattttgcacacaagtcatatccaacattacggacctattccaacttccggaatcagattctgaccccgatatcaaaaagtccactacaggtcaaaatctccaaaaatccgactttcgccatttcaagcctaaatcagctatagacctcaaatttacagtccggacacgctcctaagtccaaaatcacccaactgagctaacagaaatgacggaactccatttcggagtcatcttcacacagttccgactactgtcaaaatcctaagacttaagcttccgtttagggactaagtgtcccaaaacactccgaaaccaaaaacaaaacctcccgacaagtcacataagcagaaaaagatacgggggaagcaattaaaagggaatcgaggctattactctcaaaacgaccggccgggtcattatagatctttcacaagcttggttggggtaagtgttctatatcctaatttgattatatttcatgaatctatggttatatttatcgtttaatttgtatttagatggaggaaatcaatatttttgtaaaatattcaaaaaatgaaaatttaagatttggaagtcgagttgttactggaattggataaaattggtatggttgaactcggatcggaatggatgttcggatttcatgaaaattatatcgggttccaagaggcgggctccacactaacttttgttgactttttagaataattttttaagtcgatgttttattgtcaggaattgtttccgatgaattttaatgaagtgatacaattaatttggatagagttgagcggtccgaaggtcaattcaagtaagaaggagattttgaaatatcggcataacttcaaaaaggtaagtatcttgcctaaccttgagtgggggaattaccccttaggcatcgagtcttatgtttcatttgtgaaatgtgaaaagtcgtgtacgcgaggtgacgagtatgtactcgggcttatatgtgcaaaatttattgagttaaagtcttaggcatattgtgtagtaaattgaataattgttggcatttatttaatcatctatttgccatgcctaaattcgcatttgttgaatttatttttatatgacaatttgatgtgattattacttgtttatttatgtgaattccgtgagtttgatggttggatatttcttggaatttaatttcattatggattttccctctgcaaataattaattaaacaagcttaagaagaatgtgttgtcctatgctgagttacttttccatctatgttattgtttgaggttttatatacattgtgtggagccttgggctatttgttgtgaaattaattaattttgttatatccttggaattggttgtggccattgggcaaattgtgatatgaatttttttttgttatgttgacgtgataatattccgtataaattgttgtgttatttgagttattattttgaggatataagagtggcatttcactgttgatattatgtgggtataagggtggcatttcactgttgttatatgtgttgggttattatctgggcagagcgataagggtggctataggagcgataagggtagctattgttattgtcaggactgagggataaatgaggctattatatgagtgatgagggtggctacaggagagataagggtgtctattctcagggatgatatgtgatgatgtggagttgttgagttgatgaattttatgtgatgttgtgattttccttgtgttcatttttataccttgtgcaatttgtcttgttgttggtaaactgataatagtttgatttacgttgaaattgagagcatgtggctattgccaggcggattatgaaaagaaacgtgggcacgaggtgccgtgagtaaataatgatgatattggcacgtgaattgttattgcatttgtgatatgaattgtgggcacgaggtgccgtagttaaatgatgatgatatttggcacatgagttttccctgcggttgtgatagagaaatgggcatgaggtgccgtggaaatataaaagtgggctgagacccgtattttttgatcttgaaatgatgtgtcacagggtgacttttattcaaaacatatttatttgaaagaattatatttgaagatatttatttgaaggatttatatttgaaagatatttatttaaaagaattatatttgaaagatatttatatgaaaagagtatatttgcaagatctttatttgaaagaattttatattcaaaggatatttattcgaaagaaatatattcggaagttatgtattcgaaagaattacatgtgaaagatttatacttgaaggacttgtttaattggttgtacttgtgtttcttattcgtttgagtaataattatgatgttcttgctactttgctgtttacatcactaattgattgttgttgctatcactgccatctatttttcattatttttgtatactatattgcacaggttataagactagtgagtgtcttgactgtacctcgtcgctactctatcgaggttagtcttgatacttactgggtaccgactgtggtgtactcatactactcttctgcacatttttatgcagagccaggtattgaagatatcagactcgtaacaagttagagtgggatcgcaaagacttaaggtagagctgcttggtcgtcgcagttccttggagccttttcatttttattgtactgccatttctttttcgaacaatattttaaatctgatccttgagatcattgcatatattcagttagagtttatgactcagtattaccggtcttgggagtttgttatatttgtaattatttctgttattggtttaaaaaaaataaaaacaaatggcaattataaccgacttacctagtcttagagagtaagtaccatcactacgcctgtggtgggattttgggtcctgacaaattggtatcagagccctaggttcataggttctacgagtcacgaacgagtctagtagattcttgcggatcgttacggagacatctgtacttatcttcgagaggctaccaaactgttaggaaatttctacttctttcattcttatcgtgcggatttgttgattgtggaatttgagcctttttatctctattctctcacagatggtgaggacatgcactaccggtcagctgagcatacactcgcgtatactgctagggccgcaagaggccggggccgaggtagaggccgaggaagggcacgtgccatgactagagcacctgtctgaatagcagttgaggagccaccagtagctccagttgggggacaggtaccagaagcacctgttgttacccccaaacttcaggagactttagcacagttcctgagtatgtttggtacattaactcaggcgggattgatctctgttgcaccaaatatttcgtacattcggggagaagctcagactcctaccatgactataaaggagcaggttcacattggtcaggtttcggatgtagtaccggtataaccttttatacttgttcagcttgaggtcaggccagaggcaacagaagaagtacaaaagagacttgagaggtttaaagggtatagtccacctactttcagtggcacagcttcagaggatgcccaaggatttctagaaaagtgccaccgtattctccacaccatgagtattgtggaagtgagcggagtagcctttactacatttcagatatcaggcgcaacgtatcagtggtggcaaatttaggaagaagttagaccagccgatgcaacaccaccaacttgggctcaattttcgaaaatatttttaaaagagtttgttcccagactatccaagatgcgtggcgcacagagtttgaacggttgcgtcagggcactatgacagtgtcaaaatatgctatcaggttcggtgagttggcctatcatgcacctatcttggaacctaaacttagagagcgggttcacagattcattgatgggctggattatgatcttaaaatatgcgtggctcgagtgttgcaaactgatactccatttcaacaagtagtggaaattgcgaggaggattgaggatgttctagatgaggaaagggagtctaaggaggccaaaaggtttcgaagctatagagggttcggtggattttactcttcagctcgagtagtcggccagctcagtccacacatcagattactcagggtgctccagtaagttcttatagtacaccaccgacacagaattcttacaatggttattccagttatccgacacagactcagtacgagcaaccacgacctcaaaggggttgttatgagcgtggcgatactaggcacattatgagatattatcccatattggggtggggtggattttatcagaatgctcaggatatgggccccaatacagttactaccccacgtgcacatccagttaggggtggaagacaggcgggtatagggcgccctagagggggaggcccagcctattgatatatttgctatggtgtggcgaaggccactacaccagttggtgtcgttataggtatcctcctgatttgctataaagggatatttccccttaatttgattcggttctgaatattgaggtgcgtcctcctattatgcttcgcttataggtgagcttcgtaattttgtgacccacttatatatttatacctgttgggtggtttgataatgttagcccgtgtctatcatttttatttttgtacaccattgagggctataagtccaaatgtgactttttattactcactataatggatttcgatgtgatttcagaatagttgaattcaattttatgaattatatggcctaccggtatgatgattcattatgtgttgtgaaaactgtttatgaaatatattgaagagaagaaagaaaggaaattgaaaatttcagttggcacaatgtgcaaaatacttgtgattcgaagttgaggatgagatcctcacatttttatatgatgtggaatatttaaaccgggatacaagccgcggtggaagttatataaggacaaggtccttgtggtgaaatatttatgagtttaaaattctccctttgtgaaattaaatttgtactatagtaataatagggagtcatgcatgttagacttaattgataattcttgtatatttttctgtgcatatttagccatattcgtgctgtaaatattgggttttagcctataaggtgggtgcctaggtggcgttaaatgttactcgttaatttgggtaaataattatgagatattcatccctcgcgtgttgctgtgagtgttacgaaaagttaaaattagattttggtgaatatgagatcaattgaggatgctggaaattagttataaatagctattacaaccagagatgtggttctggacatacatataatgtgtgcgtaggtacgaattgctacagccagttgagactaataccatatgttgatgtcaggaattcaaaatttatttggagtgtaaggaattggcttaaaggcttataagtgtgaataaaagaaataatctccactaagatgattttgtcggacccctgttaaatttacggtgacataggaccatctatgagtatgtgtgaaataatgcactcagtaaattaatgtcatcagaaagattcttggcacgttcgaggacgaacgtatgtttaagagggggagaacgtaacgacccgacttgtcgttttatgaattaatgccctgttcagtgacttaatgtctcgagcagcttcgtaatatgtattatgacctgcgggtgtggtcgattttcatttccggaagattcagaattaaattaaaagaacaattctgagttgaagcttaaatggaaagagttgacttttagcaaacaacctcggaatgaaattttgatgatgtcaatagcttcgtatggtgatttcggacgcaggcgtatgtccggatttggatttggaagtccgtaggacaattcgacacattttggagaaagttagaaatataaggtttttggaaagtttggccgaatgttgaaattttgataacgaggccggaatttgattctagaaattggaatagcttcattatattatatgcatgatttgtgtgcaaaatttgaagtcattccgcattgatttgatacgttttggcgcaaaatatagaagttggaagatttgaaaactcataattcgattcgatgcgcgattcgtaatttcggcgttgcttgacgtggtttgaagccccgactgagttcgtattgtattttgggacatattggtatatttggttaaagtcccaagggcctcgggtggatttcggaaggttaacggagcaatttggacttgaaggaagatgctggaaaatggcagcaactgttggaatcgcacctgcgtaattatgggtgcaggagcgaccatcacagaagtgaatgaaggggagctgggcaaagctgatggagaaggctgcagaagcggcaacatttgcgcagaagcgcaagcgcaggtgcagccactgtgctcgcagaagcggaggcagcacaggctgtagcaaaagcgattggctcgcaaaagcgaggctgcagatgcggaaatatgtccgcagaagtggaaactgggctgaatgttaaggaccaaaaattgtcatttcaccattttcgttttggatttttggagctcggacttgagcgattctggagggatttctcacaagcttggttggggtaagtgttctatatcctaaagtgattatattttatgaatctatggttatattcatcatttaattcgcatttaaatagaggaaatcaagatttttgcaaaatctttcaaatacgaaaatttaagatttggaagtcgagttgttatcggaattggataaaattggtatggttgaactcgtatcggaatgagtgttctgatttcatgaaaattatatcaggctccgagaggcgagcttcacgttgacctttgtgactttttagaataaatatttaagtcgacgttttattattcgcaattgattccgatggatttaattaagtgatacaattaatttggatagagttgagcggtccggaagtcaattcaagcaagaaggcaattttagaatatcggcataacttcaaaaaggtaagtgtcttgcctaaccttgagtgggggaattacccattaggcatcgagtcttatgttctatttgtgaaatgtgaaaatccgtgtatgcgaggtgacgagtacgtacttgggcttatatgtacaaaatttattgagttaaagtcttaggcatattatgtagtaaattggataattgttggcatttatttaatcatctatttgccatgcctaaattcgcatttgttgaatttatttttatgtgacaattgatgtgattattacttggatatttatgtgaattccgtgagtttgatggttggatatttcttggaatttaattttgttatggattttccctctgcaaataattaattaaacaagcataagaagaaggtgttgtcctatgctgagttatttttccatctctgttgttgtttgaggttttatatacattatgtggagccttgggctatttgttgtgaaattaattaattttgttatatccttgaaattggttgtggccattgagcaaattgtgatatgaattgttttttgttatgttgacatgataatattccgtgtaaattgttgagttatttgagttattattttgaggatataagggtggcatttcactgttgatattatgtgggtataagggtggcatttcactgttgttatgtgtgttgggatattgtctgggcggagaggttactataggagagacaagggtggttgtaggagcgataagggtggctattgatattgtcagggcgaagggataagggaggctattataggagtgataagagtggatataggagagatgagggtggctattgttagggatgatatgtgatgatgtggagttgttgcattgatgagttttatgtgatgttgtgattttccttgtgttcatttttataccttgtgcattttgtcttgttgttggtaaattggtaacggtctgatttacgttgaaattggaagtctgtggctattgttaggcagattatgaaaagaaatgtggcatgaggtgccgtgagtaaataatgatgatattgtcacgtgaattgttcgtacagttgtgatatgaattgtgggcatgaggtgccgtggttaaaaggtgatgatatttggcacgtgagttgtccgtgcggttgtgatagagaaatgggcatgaggtgccgtaaaaataggaaagtgggctaagactcgtattttatgatcttgaaatgctgtgtcacaaggtgactattatttgaaagatatttatttgaaagaattatatttgaagatatttatttgaaggaattatatttgaaagagatttatttaaaagaattatatttgaaagatatttatttgaaaagagtatatttgcaagatctttattttaaagagttttatattcaaaggatatttattggaaagaaatatattcagaagttatttattcgaaagaattacatgtgaaagatttatacttgaaggacttgtttaattggctgtacttgtgtttcttatttgtttgagtaataattctgatgttcttgctgttttgctgtttacatcactaattgattgttgttgctatcactgccatctatcttccattatgtttgtatactatattgcacaggttattagactagagagtatctttactgtacctcgtcactattccaccgaggttagtcttgatacttactgggtaccgactgtagtgtactcatactacacttcggcacatttttgtgcagagccaggtattgaagatattggactcggaccaagttagagttggatcacaaggacttacgctagagctgcttggtcgccgcagttccttggagtctttccatttttattgtactatcatctctttttcaaacagtgttttatatccaatccctgagatcattgcatgtattcagttagagttcgtgactcagtattactagtcttgggaggttgttatagtaataattattttcgttgttggtttgaaaaaaagaaaaacaatggcttgaattgttattataatcggcttacctagtcttagagactaagttccatcacgatgcatgtggtggcattttgggtcgtgacaacaattgattgtaaatatcgtttcatgattatatcttttgttgttaaaattgtttgtacgtgctttacttgaaattgttagcacatgttccatccttgttgtcaagttcacccttatatgctaattgttgattgtaatcacttcttcaattcatgcttcacctgctacataccttaattgtcaattgatgctcatagattgtgcctttgcttatggattattatttctttgctatttgatttcgtgagctatcgtgtagcctttttcattagttgtgacgtctttgtgtagcctcgttattccttttgatttattggtataccgtagttagttgtaaattggttgcctaatttgtgttgcttgaagatcgggttgcacgccgcaacaaatatgatttattattgtgagggattgggttgcacgtcccaacagatatgattattattgtgtgggatcaggttgtacgccgcaacaaatatgattaatattgtatgggatcgggttatacgccacaacaaatgtacaaatatcaaattattgtgatattaaggttaattccgattgtgattctcatgatgcatttcatgctaggacggttactgtggtttcttaaatcacttcannnnnnnnnnnnnnnnnnnnnnnnnnnnnnnnnnnnnnnnnnnnnnnnnnnnnnnnnnnnnnnnnnnnnnnnnnnnnnnnnnnnnnnnnnnnnnnnnnnnnnnnnnnnnnnnnnnnnnnnnnnnnnnnnnnnnnnnnnnnnnnnnnnnnnnnnnnnnnnnnnnnnnnnnnnnnnnnnnnnnnnnnnnnnnnnnnnnnnnnnnnnnnnnnnnnnnnnnnnnnnnnnnnnnnnnnnnnnnnnnnnnnnnnnnnnnnnnnnnnnnnnnnnnnnnnnnnnnnnnnnnnnnnnnnnnnnnnnnnnnnnnnnnnnnnnnnnnnnnnnnnnnnnnnnnnnnnnnnnnnnnnnnnnnnnnnnnnnnnnnnnnnnnnnnnnnnnnnnnnnnnnnnnnnnnnnnnnnnnnnnnnnnnnnnnnnnnnnnnnnnnnnnnnnnnnnnnnnnnnnnnnnnnnnnnnnnnnnnnnnnnnnnnnnnnnnnnnnnnnnnnnnnnnnnnnnnnnnnnnnnnnnnnnnnnnnnnnnnnnnnnnnnnnnnnnnnnnnnnnnnnnnnnnnnnnnnnnnnnnnnnnnnnnnnnnnnnnnnnnnnnnnnnnnnnnnnnnnnnnnnnnnnnnnnnnnnnnnnnnnnnnnnnnnnnnnnnnnnnnnnnnnnnnnnnnnnnnnnnnnnnnnnnnnnnnnnnnnnnnnnnnnnnnnnnnnnnnnnnnnnnnnnnnnnnnnnnnnnnnnnnnnnnnnnnnnnnnnnnnnnnnnnnnnnnnnnnnnnnnnnnnnnnnnnnnnnnnnnnnnnnnnnnnnnnnnnnnnnnnnnnnnnnnnnnnnnnnnnnnnnnnnnnnnnnnnnnnnnnnnnnnnnnnnnnnnnnnnnnnnnnnnnnnnnnnnnnnnnnnnnnnnnnnnnnttaattaatcgtcaatttattaaaaatggaacaatatgcacttcttgtgtaagtcatgtatcctatgtgatatgttaagttgctgagaatatagcagaggtaaatgaaaggattttcaagttgttccccttgtgtgtctttcaaaaataaaacccatatcttattcggagatttactaaattgaatggtgactatatttttactctaattaatttttcaaccttctcattaacttattgccgtgtaatttgcgtgaaaaattattatttcgttttaccttaataaatccctgtaacgacccaacttgtcattttaagaattaatgccccgttaagcgacttaaggtcttgagaaggttcgtaatatgtattatgacccgcgtgtgtggtcgagtttagttttcgaatttaattaaaagaacaatcctcattttgaagcttaaaatgaaaagagttgaccagagtttgactttgagaaaatgactcaggaatagaattttgatgatgtcaatagcttcgtatgatgatttcggacataggcatgtgtccggatttggatttggaagtccataggacaatttgacgcattttggcgaaagttaaaaaatggaagctttttagaaagtttgaccggaagttgactttattaatatcggggtcgaatttgattctcgaaattggaacatatccattatgtcatttatgacttatgtgaaaaatttgaagtcattccagattgatttgatacacttcggtacaaagtactgaattatgaaatttcatagctcataattcgattcgaggcgcgattcattgtttcggccgttgtttgatcttatttgaagcctcgactatatttgtatcatgttttgggacttgttggtatgattagagcttgggtgtatttttggatcattggttgaaagacaagtaaagttaagaaatttaggagtttgaccatggtcaatattgggtcaagacgacctcttttcagtgttttgagagggcgagcaggtccgtagcatgttttatgactgaaattcatatatggtttgtgtccgggaggttctggatgagtttcagagtggtttcgcatcatttcggagaagtttgagtttgttggtttttggtgaggtactgttcattcgcaattgcgaaaacaccattcattataaatcgcgaacaatttatcgaaattgcgaaaatactgttcattcgcaattgcgaactatttatcgcaattgcgaacactattcatgggagggttactgttcatttgcaaatgcgaacctgggcaaaaatttaaggattaaaaatctgtcatgtaatgaccctgccggtcgttttgagtattaccacctagtttcccccatttactgctcaatttgtgctttacagttgttgtgtgacttgcttgggtaattggttcgggtccgatgagtttttggaatgaattggaacacttagtttcaaggtttaaaacttaatttaaaatagtgaccggatgtcgacttatgtataaacgaccccggaatggagttttgatgattccaatagctccgtatggtgattttagacttaggagcgtgtccgaaaaattatttggaagtccgtagtaaaattggtttgaaatggcgaaagttgaatttttggaaagtttgacaagagagttgactttttgatatcggagtcggaatccagttctgaaaatttttatagatctgttatgtcatttatgacttgtgtacaatatttgaggtcaatcagaatcgatttgataggtttcagtatcaaatgtagaagttcgaaattcttaagttccttaagcttgaattggggaatgattcttggttttagtgttgttttatgggatttgaggtttcaactaagttcgtatgatgttttagtacttgatggtgtatttggttgaggtccagagggcctcgggtgagtttcagatggttaacagatcaaaattttgacttaaacaactactagattttttttgcagaaaagaacaaggctggaaaaataaaggtcaggaaatcgaggtcatgaaaatcgaggtcataaaaatcgaggtcatgaaaatgaaggtaatgaaaattgaggtcataaaaatcgagggtaggaaatcgaggtcatgaaaattgaggttaggaaatcgagggcagcgcccggacaaaaactttaagttataaaacagggggtttcgtcccatttttccatttttgagaaatcggagcttggggagtggcgatttttgagagattctcaaggaaaaaatcaaggtaagtgattctaactcggtcaatatacacgaatatatcattgttttcatcatttaattagtattttgagatggaaatttggggaaaatgaggaagtgttcttgggctagaattttgaggttttgaattggattttattatcgaatttgactaaatttggtatggttagactcgtgagtgaatgggctttcgggttttgtgacttttgtcggatttcgagacgtgggcgagaggtcgagtttgaggcgattttggatttttggctataatttcatattttcttgtggaattgattcctttagcctatattcattgtattgtactgcttgtggccagattcgggacgtttggagaccgatttgagaggcaaagacattttggagtagagttctactcggattgaggtaagtaacacttctaaacttggttatgagggtatgaatccccgaatttggtgttatataaattgcttgtaggtgacgaccacgatagttaacgagtgtgtggacgtgcaccatagaatttgtgacttgaataatttctgtggagttgaaaaattaaagaatcatgttattatcaatgtatcctccacgtgttagagacatttagctgagatccctattaaagatcatgtttaggctacgtaccggtatttttgggacctatggggtcgagttgctattgaattgattgttttaaattgtaattccatactcagtcatgttcatttatttcatatcatatctcagtctatgttgttatttattgatacatcatataatcattttgggcttattttcatgacatttcgagctcaagagactggagagattgaggactgagtgaggctgagggcctaattatgaggatatttatgggatcgagttgcgtgccatagcaaaccatattggctttatatatattattattatatggatcagggctgccctccagcagcaggccttatagtctttattattattacgggatcggactgcacaccacagtagaccatatcggctttatataacgcttgggctgaaggggcccctccagagtctgcacgcagccccagtgagcgcggttgatttatatcgattgggatgaaggagtccctccggagtctgcacacacgcccaatgagcgcggttgatttatattgaggaatgtatcttccgtggacatgtatcttgtctgaagcatttatattgagggatggatcttccctgggcatgcatcttgcttgaagcatttatattgagggatggatattccctgggcatagatcttgcccgaagcatttatattgagggatggattttccctagacatggatcttgtccgaatcattgatatttggggatagatcttcccctgtgatggattggccatatactgagtgattgagtattttagattgtgagtacacagagttttcactaaggtgcatcatatacagtatgtacattggcatatagatacaaagatgtcacattcctcgtattgttcagaattgatctattttatttgtactgaaagcaactgttgaactagaaagcatgcctacatttctgtattgttattatttatactggactgtacctgcggagctcatcactactttcaacccaaaggttagtcttgttacttattgagttggttgtactcatactacactctgcacctcgtgtgcagatctaggtgctttcggacatggcgaccattagatcttagagtgttatcagttggagactatcaaggtagctgtctggagttagctgaccttgactccatttctttcaattattgtacttgtcacgacccaaaatctcacctgtcgtgatggcgcctatctcgatactaggtaagccgataacatcaataacccacgatttccttaaagtttgaaaaacataataatttgagtttaataaaagacctcacaacttcagatgcaaacactcccaaaacctggtgtcactgagtacatgagtatctaatataaataaaattctggaaaatacagtctataatagtatgagaccaaatacagtaaacaaggagatcgggaaagagagacaaggtctgcgaaacacagcagctacctctgaatctccggggaaaaaaaattcaactgtgcaaaagaatcaacatttgctatgtcagggagcacctggatctgcacacgaagtgcatgatgtagtatgagtacaaccaactaagctagtaataataataaataaggaactaaagatagtgacaagctacacagtaatagttcattttcagtaattccagcaaagaatagacatgctttcaaatccgacagtttaagtcaaatcagtttttaaacagttcaagttcaggtaatccggatataaaatctttcagaaatttcacaacaatgacagatagcaactaagtgcaacaacagataaaaagcaagtacaacctccaagggcaacagtcactcaacttaacacaacatctgaatcactcggcttccagccctcagaactcacactcaataggtacctgcgctcactaggggtgtacagactccggaggggctcctacagcccaagcgctataatccgcacggacaactcacgtgctacatggacaactcacatgctatagtatccatacctcaccgacaggccctcggcttcacttagtcatcaacctctctagtctctcgggctctcggaaatcacaaagatcaacccaaacaaagataacatagtgtatcaacaaaaatcaagaaagattgaggtatgatacgcaagtaaaaatcatgactgagtagaagacaccaattagcaaataattcaacaagtacgcgacctctgcgggtcccaacaatactatcacatagtctaagcatgatttgtggtaaaatttctataacacagggagagcatatagctagcaacaagttatacaactttacagttccacggaatggaccaagtcccaattcgtacggtgcacgcccacacgtccatcacctagcatgtgtgtcacctccaaaatacgcacataatctaataattcggggtttcataccctcaggaccagattttaaaactgttacttacctcaaactgtgtaattctttattctgctaagtctttgcctcgtgaattggcctccaaacgactcaaatctagccagcattaatccgatttagtcaataaaatttattggaattaattctataagaaatactaattttccagcaaaattcgaaatttagctcaaaaaatcgtccgtggggccatatctctgaacccaacaaaagttacaaaatttgaaagtccattcaaccacgagtataaccataccaattttaccaaaatccaaactcaactcgaccctaaaatcttcaaattaaaccgagaaggttttccaaaattttcaacttaatttacccattaaacgataaaaacaaccatggattcaggtaatttgatcaataatgagttaagaatacttgccccatttttttccttgaaaagctcccaaaaattgcctttttccgagctctactccgtcaaaaatggaaactgggacgaagtcccattttcagagcttaaactttctgtccagacctctcttcttcacgaacgcgacaggtccctcgcgttcgcgaagcacaaaatcgtgctgcccaacatttctcttcgggaacgcgagacactgctcgcgaacgcgatgctttaccaagcttttcttcacgaacgcgaaggcaaaaacccatgcccactattttccccttcgcgaacgtgatacccaatcacgaacgcgatgaacaacccagctcctcttcgcgaacgtgatgggaaaatcttgcctgcctcaaattctccttcgtgaacgcgagggcccacttgcgaacgcgaagaaggaaaccagaaaaacacaccagcagttttcagccaacatgccaagtccaaaaatgatccgttaacctcccgaaacttactcgaggcccccatgacctcaaccaaatataccttcaagtcccataacatcatacgaacttagtcgaaccctcaaattaactcaaacaatgctaaaaccatgaatcattccccaattcaagcctaatgaactttgaaatttcaagttttcacaaacgacgccggaacctatcaaatcaagtccgattgacctcaaattttnnnnnnnnnnnnnnnnnnnnnnnnnnnnnnnnnnnnnnnnnnnnnnnnnnnnnnnnnnnnnnnnnnnnnnnnnnnnnnnnnnnnnnnnnnnnnnnnnnnnnnnnnnnnnnnnnnnnnnnnnnnnnnnnnnnnnnnnnnnnnnnnnnnnnnnnnnnnnnnnnnnnnnnnnnnnnnnnnnnnnnnnnnnnnnnnnnnnnnnnnnnnnnnnnnnnnnnnnnnnnnnnnnnnnnnnnnnnnnnnnnnnnnnnnnnnnnnnnnnnnnnnnnnnnnnnnnnnnnnnnnnnnnnnnnnnnnnnnnnnnnnnnnnnnnnnnnnnnnnnnnnnnnnnnnnnnnnnnnnnnnnnnnnnnnnnnnnnnnnnnnnnnnnnnnnnnnnnnnnnnnnnnnnnnnnnnnnnnnnnnnnnnnnnnnnnnnnnnnnnnnnnnnnnnnnnnnnnnnnnnnnnnnnnnnnnnnnnnnnnnnnnnnnnnnnnnnnnnnnnnnnnnnnnnnnnnnnnnnnnnnnnnnnnnnnnnnnnnnnnnnnnnnnnnnnnnnnnnnnnnnnnnnnnnnnnnnnnnnnnnnnnnnnnnnnnnnnnnnnnnnnnnnnnnnnnnnnnnnnnnnnnnnnnnnnnnnnnnnnnnnnnnnnnnnnnnnnnnnnnnnnnnnnnnnnnnnnnnnnnnnnnnnnnnnnnnnnnnnnnnnnnnnnnnnnnnnnnnnnnnnnnnnnnnnnnnnnnnnnnnnnnnnnnnnnnnnnnnnnnnnnnnnnnnnnnnnnnnnnnnnnnnnnnnnnnnnnnnnnnnnnnnnnnnnnnnnnnnnnnnnnnnnnnnnnnnnnnnnnnnnnnnnnnnnnnnnnnnnnnnnnnnnnnnnnnnnnnnnnnnnnnnnnnnnnnnnnnnnnnnnnnnnnnnnnnnnnnnnnnnnnnnnnnnnnnnnnnnnnnnnnnnnnnnnnnnnnnnnnnnnnnnnnnnnnnnnnnnnnnnnnnnnnnnnnnnnnnnnnnnnnnnnnnnnnnnnnnnnnnnnnnnnnnnnnnnnnnnnnnnnnnnnnnnnnnnnnnnnnnnnnnnnnnnnnnnnnnnnnnnnnnnnnnnnnnnnnnnnnnnnnnnnnnnnnnnnnnnnnnnnnnnnnnnnnnnnnncaacagacctaaaattttcagaatcgaatttcgaccccgatatcaaaaagtcaacccccggtcaagcttcccgaaaatttgactttcgccatttcaagcctaattccactatggacctctaaataattttccggacacgttcctaagtccaaatttaccatacggagctattagaatcatcataattcaattatgaggtcatttacacatgaatcaatatccggtcaacgtttcgcacttaagttttcaactaagagattaagtgtctcatttcactctgaaatccttccggacccaaaccaaataactcggtaagtcataagaacaattgtaaagcataaattaagcagtatatagggaaatagggttataatactcaaaatgaccggccgtgtcattacagtactgttctatactttcagatagtgttttgtcaatgagactttgtattcatattagatgctcatgtaatcagtgataccggattttgggagtgtatatatatgtaattgtgagatttcttccactgaatttaaatattatgttttcaaacttaaaagagatggtggtttattgagattgtcggcttgcctagtattgagataggcaccatcacgacaggtgagacgtcggtacagagacgtctatacttatcttcgagaggctgccgaacccttaggaaaattttactttcttgtattctatcgtgcgaatttgttgattccggaaactaaaattctgttattctattatctcacagatggtgaggacacgtactaccggatcggatggtcagccaacagtgccaccagttaggcccgcaagaggccgtggccgtggtagagccctgggccgaggtagaggtcaaggtatagctcatgcaacagttggagcagcacctgtagtaccagcaattgctccaactcaggagcagattccaaatgtagttgagccggtgggaccagctcaggtaccagctgtgaccattgtgattccaggccttcaggagactttagcctagatattgacagtgtgcactggtcttgctgaggtagttttggctcagggcgcacctgccacttctcaggccgagagagatactcatacccctgtttcccgtactccagatcaggtagtgcagggacttgaaatactggggacactactagccnnnnnnnnnnnnnnnnnnnnnnnnnnnnnnnnnnnnnnnnnnnnnnnnnnnnnnnnnnnnnnnnnnnnnnnnnnnnnnnnnnnnnnnnnnnnnnnnnnnnnnnnnnnnnnnnnnnnnnnnnnnnnnnnnnnnnnnnnnnnnnnnnnnnnnnnnnnnnnnnnnnnnnnnnnnnnnnnnnnnnnncggtagttcctattatggcagatgatgagtagaggagacttgagatatttgggaggtttctacctccatcatttagcagtgctgagtcagaggatgctcagggttttctggataagcgccagcggatgcttcagacaacgggtattctggagaccagtgggatctcgttcactacttttcagttttctggagttgcctttagttggtgggaggcttatgagaggtgcatgccgattggtgaattaccacttaaatggcatgagttctccgttctcttttttgagaagtttgtgccgcagtcttgtagagaggaactacgcaggaagtttgagaagttacatcaatatgacatatttgtgacgtagtacgagatgcgattttttgagttggctcgtcacacagtttggttggttcccactgatagggaaaggattaagaggttcattgatggcctcacatattaactacggttacttatgactagggatagggtatctgttgccacctttgaagaggtggtagacattgctcggcagatagagatggtccatagctaggagcgtgttgagagggaggccaagaggctcgaggttggggtggttctggtggggtaccttctgtaggacagtcctaccacatcaagggttgttcttacagacacggtcaccggggtgaatcatccagccatggttcatacggttctcatcagggccagtcatctctcagtgcacttctagcctagagtacgccatgtgctccctccgttcaaggatcatctgcaccaggttcttctggtatttattttggttctcgaggtccacctcagaactgatcagccttttcagataggggttgctttgagtgtggagacttgggccacataaagagatattgtccctgccttatgcgaggtccagttcagcagatgagtcatgttacgacttctgcaccagctgctccaccagctgctccaccacctgcccaaccagctcaggatggggctcagtcagctaggggtcgcccaagagggggaggccaattaagtggtggtcaggcccgattttatgctttttctgccaggccagatgctgttgcttcagatgtagtgatcacatgtattgtttcagtgtgccacaaagaggattctatattatttgaccctggttccacatattagaatttttatcatattttgttcattatctggatatgcctcgtgagtccttagtttcacatgtttatgtatctatgccggcaggcgatactataattgtggaccgtgtgtatcagtcatgtgtggtaattattgggggactagagaccagagttgatcatttattacttagtatggtcaattttgatgttaatttgggtatggtgagttatcagatgttttgatatttggctttgagccaagtaggggagcctgccattgacgatttgatttcatgtttatgtgttgtactggtttcggtttgaggcatacatgtgaatcgattataacttgcacagattgagatcggggatgacttgagtaagaaaatttcttgaatgatggttatattgcactttatgaaaaaaaatcatgaaatgatcaaattgttattttgaagaatgtactgcgcacgaagtatgaatttgattggtggtgttaaggcagggttacttctttgggggccgttgtgctaatggtacttgtgtcttttggcctgtttgggtagttaatatctctgcattaacttgccgatttgagtagtgatagcacaccttgcacatgcctagtacatggcgtgttatttgtacctgtccaagagcatgagaatcataattcatttatcatatacatgtgtacttatttgatcgttcatgtataatatgcttggactggaggcctatgaccatgccatgtggtttatattattggcacgtgagttgtccgtgcgagtccagatatttatactatagcacgtgagttgtccgtacgagtgatgataatgtgagctctagaagagctggttactctgattaaattcgtgtgtcttggttctactacatataatgagcttatagcattgaagttgtggtgatgcttattgaacttgcaatactgttctctacttcgagacatcttccatttgggtacaaggttgagcagttgtggcttgagttgtattggtgtggcatgttagtgggatagttatgtttaataatatatggtcattggacctataatgggtactataatattttatgatggtatattggggtttaattactagtaccgggttggttttgagtagttactatgatcgagaatggtgttgcgagtttgcgagttgtgtagtaggttatgcgattatatcttgagttatggctatagctttctagagtttattcatacttatacagtgtatagatgtgaaattcgagtcttgaaaaaaaaagaaaaagaaaaatctaaatgttagaaattgatttccaaggattatgggctaaggttgaagtaatgatgttcaattacatggtattgtcaagcctatatggaatagggtagcatgggatcacccccgggtttgtgcgtggtaagatggaatggtgatgtgatggcttggaaacaactcttggcacattcgaggacgagtgtatatttaagtgggggagaaagtaatgacccggccgattgttttaagtattaccacatggtttcccccatttactgctccacttgttctttaaagtttttgtgtgatttgcttgggtaattggctcgggtccggtgaggttttggaatgaattggaacacttagttctaaggtttaaagcttaagttaaaatagtgaccggatatcgacttatgtnnnnnnnnnnnnnnnnnnnnnnnnnnnnnnnnnnnnnnnnnnnnnnnnnnnnnnnnnnnnnnnnnnnnnnnnnnnnnnnnnnnnnnnnnnnnnnnnnnnnnnnnnnnnnnnnnnnnnnnnnnnnnnnnnnnnnnnnnnnnnnnnnnnnnnnnnnnnnnnnnnnnnnnnnnnnnnnnnnnnnnnnnnnnnnnnnnnnnnnnnnnnnnnnnnnnnnnnnnnnnnnnnnnnnnnnnnnnnnnnnnnnnnnnnnnnnnnnnnnnnnnnnnnnnnnnnnnnnnnnnnnnnnnnnnnnnnnnnnnnnnnnnnnnnnnnnnnnnnnnnnnnnnnnnnnnnnnnnnnnnnnnnnnnnnnnnnnnnnnnnnnnnnnnnnnnnnnnnnnnnnnnnnnnnnnnnnnnnnnnnnnnnnnnnnnnnnnnnnnnnnnnnnnnnnnnnnnnnnnnnnnnnnnnnnnnnnnnnnnnnnnnnnnnnnnnnnnnnnnnnnnnnnnnnnnnnnnnnnnnnnnnnnnnnnnnnnnnnnnnnnnnnnnnnnnnnnnnnnnnnnnnnnnnnnnnnnnnnnnnnnnnnnnnnnnnnnnnnnnnnnnnnnnnnnnnnnnnnnnnnnnnnnnnnnnnnnnnnnnnnnnnnnnnnnnnnnnnnnnnnnnnnnnnnnnnnnnnnnnnnnnnnnnnnnnnnnnnnnnnnnnnnnnnnnnnnnnnnnnnnnnnnnnnnnnnnnnnnnnnnnnnnnnnnnnnnnnnnnnnnnnnnnnnnnnnnnnnnnnnnnnnnnnnnnnnnnnnnnnnnnnnnnnnnnnnnnnnnnnnnnnnnnnnnnnnnnnnnnnnnnnnnnnnnnnnnnnnnnnnnnnnnnnnnnnnnnnnnnnnnnnnnnnnnnnnnnnnnnnnnnnnnnnnnnnnnnnnnnnnnnnnnnnnnnnnnnnnnnnnnnnnnnnnnnnnnnnnnnnnnnnnnnnnnnnnnnnnnnnnnnnnnnnnnnnnnnnnnnnnnnnnnnnnnnnnnnnntgaccctggaatggagttttgataatttcaatagcttcgtatggtgattttggacttagaagcgtgtccgaaaaattatttggaagtccgtagtaaaattagtttgaaatggcgaaagttgaaattggcgaaagtgcgtagtaaaattggtttggaagtccggagagttgactttttgatatcgaggtcggaatccagttctgaaaactttcatagatccgttttgtcatttatgacttgtgtgcaaaatttgaggtcaatcggaattgatttgataggtttcggtatcgaatgtagatgttgaaaattcttaagttccttaagcttgaattggggtatgattcgtggttttgcgttgttttatgggatttgaggtttcaactaagttcgtataatgttttagtacttgttggtgtatttggttgaggtccagagggcctcgggtgagcttcggatggttaacaggtcaaaatttggacttaaatagctgctggaatgtttctgctggaaaacaaatgaggctggaaaaatcgagatcatgaaaatcgaggtagtaaaaatcgagggcaggaaatcgagctcatgaaaattgaggtcatgaaaatcgaggccagggaatcgaggtcatgaaaatcgaggtcataaaaattgagggcaggaaatcgaggtcataaaatcgagggcagcgcctggacagaaatgggggtttcgtcccactttttcatttttgacaaattggagcttggggagtagcaaattttgagagattctcaaggaaaaacatcggggtaagtgcttctaactcggatttggtcaatatacacgaatatataattgttttcatcatttaattagtgttttgagatggaaatttggagaaaatgaggaagagttcttgggctagaattttgaggttttgaattggattttgttatcggatttgagtaaatttggtatggttagactcgtgagtgaatgggctttcgggttttgtgacttttgccagattttgagacgtgggcccgaggcctagtttgaggcgattttggatttttggctataatttcatattttttggtggagttgattcctttagcctatattgattgtaatgtactacttgtggctagattcggaatgtttggagactggtttgagaggcaaaggtattttggattagagttctagtcagattgaggtaagtaacacatctaaacttggttctaagagtatgaatccccgaatttggtgttatataaattgcttggaggtgacgcacatgatagttaacgagcatgtggacgtgcaccatagaaattgtgaattgaaaaaattctgtcgagttgaaaaattaaagaatcatgttattatccgtgtatcctccacgtgttagagaaatttacttgaggcacctattaaatatcatgtttaggctacgtaccgatatttttgggaccaatgaggtcgagttgttgttgaattgattgttttaaattgtaattccatactcagtcatgttcattcatttcatattatatctcagtctatgttattatttattgatatatcatattatcattttgggctgattttcatgacattttgagcacaagagactggagagattgaggactaagtgaggctgagggccaaattgtgaggatatttatgggatcgagctgagcgccgcaacagaccatattggctttatatatatatatatatatatatatatatatatatatatatatatattattatactgcccgccagcagcatgatttataggctttattatttcttatgggatcgtactgcccaccgcagtaggccatatcggctttatatagtgcttgggctgaaggggcccctccagagtctacacacacccccagtgagcgcggttgatttatggcgcttaggctgaaggagcccctccagagtctgcacacaccccaagtgagcgcggttgatttatattgagagatgcatcttccctgtacatggatcttgtccgaagcaattatatttggggatgtatcttccctgggcatggatcttgcccgaagcatttatattgagggatggatcttccctgggcatggatcttgcccgatgcatttatattgagggatgtatttccctggacatggatcttgtcctaatcattgatatttggggatggatcttccccctgggctggattggccatatacagtactgagtgattgagtattttagattgtgagtacacatagtttatgctaaggtgcatcacatacagtatgtacattggcatgtagatacagagatgtcatattcctcgtattgttcaaaattgatctgttttatttgtactgaaagcaactgttgaacttgaaagcatgcctacatttatgtattgttannnnnnnnnnnnnnnnnnnnnnnnnnnnnnnnnnnnnnnnnnnnnnnnnnnnnnnnnnnnnnnnnnnnnnnnnnnnnnnnnnnnnnnnnnnnnnnnnnnnnnnnnnnnnnnnnnnnnnnnnnnnnnnnnnnnnnnnnnnnnnnnnnnnnnnnnnnnnnnnnnnnnnnnnnnnnnnnnnnnnnnnnnnnnnnnnnnnnnnnnnnnnnnnnnnnnnnnnnnnnnnnnnnnnnnnnnnnnnnnnnnnnnnnnnnnnnnnnnnnnnnnnnnnnnnnnnnnnnnnnnnnnnnnnnnnnnnnnnnnnnnnnnnnnnnnnnnnnnnnnnnnnnnnnnnnnnnnnnnnnnnnnnnnnnnnnnnnnnnnnnnnnnnnnnnnnnnnnnnnnnnnnnnnnnnnnnnnnnnnnnnnnnnnnnnnnnnnnnnnnnnnnnnnnnnnnnnnnnnnnnnnnnnnnnnnnnnnnnnnnnnnnnnnnnnnnnnnnnnnnnnnnnnnnnnnnnnnnnnnnnnnnnnnnnnnnnnnnnnnnnnnnnnnnnnnnnnnnnnnnnnnnnnnnnnnnnnnnnnnnnnnnnnnnnnnnnnnnnnnnnnnnnnnnnnnnnnnnnnnnnnnnnnnnnnnnnnnnnnnnnnnnnnnnnnnnnnnnnnnnnnnnnnnnnnnnnnnnnnnnnnnnnnnnnnnnnnnnnnnnnnnnnnnnnnnnnnnnnnnnnnnnnnnnnnnnnnnnnnnnnnnnnnnnnnnnnnnnnnnnnnnnnnnnnnnnnnnnnnnnnnnnnnnnnnnnnnnnnnnnnnnnnnnnnnnnnnnnnnnnnnnnnnnnnnnnnnnnnnnnnnnnnnnnnnnnnnnnnnnnnnnnnnnnnnnnnnnnnnnnnnnnnnnnnnnnnnnnnnnnnnnnnnnnnnnnnnnnnnnnnnnnnnnnnnnnnnnnnnnnnnnnnnnnnnnnnnnnnnnnnnnnnnnnnnnnnnnnnnnnnnnnnnnnnnnnnnnnnnnnnnnnnnnnnnnnnnnnnnnnnnnnnnnnnnnnnnnnnnnnnnnnnnnnnnnnnnnnnnnnnnnnnnnnnnnnnnnnnnnnnnnnnnnnnnnnnnnnnnnnnnnnnnnnnnnnnnnnnnnnnnnnnnnnnnnnnnnnnnnnnnnnnnnnnnnnnnnnnnnnnnnnnnnnnnnnnnnnnnnnnnnnnnnnnnnnnnnnnnnnnnnnncagattgtactcatcactactttcagcccaaaggttagtctttacttattgagttggttgtactcatacaacactctccacctcgtgtgtagatccaggtgctttcggacacggcgcccgttagatctcagagtgttatcagttggagactatcaaggtagctgcctagagtccgatgaccttgactcccttttttcagttattgtactgttctatactttcagacagtgttttgtcaatgagactttgtattcatattagatgctcgtgtactcagtgacaccgggttttgggagtgtttatatatgtaattgtgacatttcttccgctgaatttaaatattatgttttcaaacttaaaagatatggtggtttattgagattgtcgacttgcctagtatttagataggtgtcatcacgaaagatgagattttgggtcatgacatgtcatttcttcattttcgattgggatttttggagctcgaatttgggcgattttgaggatttcttcacaactttgactgggataagtgttctatatccgaaagtgattatatttcatgaatttatggttatatttatcgtttaattcgagtttcaatggaggaaattgggccttttgtaaaacttttcaaaaataaaaatttaagatttggaggacgattcgttattggaattcgataaaattggtatggttgaactcgtatcggaataggtgttgagatccgtgaaaattttgtcgggttccaagaggtgggccccacgttgacttttggttgactttttagaataaaattttaagtcgacattttattatccgaaattatttccgatgaattttaatgaagttatacaattaatttggataaatctgagctttccggaggtcaattcaagcaagaagacgattatagaatatcggcataacttcaaaaaggtaagtatcttgcctaaccttgagtggaggaattgccccttaggcatcgagtcttatgtgccatttgtgaaatgtaaaaaaaaatcgtgtacgcgaggtgaagagtatgtattcgggcttatatgttcaaatcttaagtgtttaaagtcttaagcaatttatgtagtaaaatggatatttgttggcatttattaaatcctctatttgcagtgcctcaatccttgttgtcgaatttgtttttatatgacgatgtggtgtgattgccaccttgatttttatatgaatcccgtgtttttgttgagttgatattttatggagataatttcattatggattatttatttgcaaatagtttatttaataattttaaaaggaggcaaagtgttaaatcttgaaatattattctgttgagtggttcacttccggatatttttattaagattttgtgcacattatggtcgagccatgggctccttattgtgaaacataatgtgttgttgatttctgtggcaagttgtaatatttaagcacttgtggtgcaatttatgagatgtcgtgatattgttgggaggtttgttcgggtgtttgcacgaggtttatgtcatgctattgttactattgatatatgcacatgcggcgtgataaggtatgctatatatatttgtgggtttgtgcatgtagcgagacaaggtggaaatattattatgtgcgtacgacgagataaggcaggcatttgctttattattgcgtgcgtggcgagacaaggtgggctatgtcgggaatgatttgtgattacttgtgatgatctggggtcattgttgttgaaatttatttatgatttgggactacgaggcggtatctcgggagtgcccttttgttgatatttctctatggctgcacttgcctttcgttatttaatttagtttttcggtaatatgtaaattcctttgttctccgtgatgtattatttgacttaatattaaatgttttgtatttattgtagtattatgttagctttggcttttttgtactagactatgatgatttgtatttctggtttgtacttgttcttaatgattgagttattttaaataaaagaattactattatgttttaatttaataagttttatatccaaatcagtagcttatctgatgctttattttaactaaaatgtcactttccccactcaaactatttcaaaaataaactcatttctttgttgaattcttacttggtttaaaaatagtaaccttaatttattgaaaataaattgatcgtgcagattttatgtactgatatatttggcaagagagttgtccgtctggttgtgatagagatatgggcacgaagtgccgtgagaatatgaaagggggttgagacctgtattttatgatttttacataaggattatttatttgaagaaatatattcgtagggtatttattcgaaagaattatatgtgagggatttatatttgaaggacttgtttaattggttgtacttgtgtttcttatcgtctgagtaataattatggtattcttgttgccttgttgtttatatcaccagttggttatagttgctatctgtcacgacccaaaatctaattaatcacgatggcacctaacccaacccgctaggtaagccaactttcagttatccaattccaataataattattaaagaaatttaagtaaattacgttcttaatcttatacattctccaagaactggtagtacaaatcatgagcttctaagaatagagtatacaatgctggtataaagtaaatacatcatctgtttgaaaagtacataaacagagttttatgaatctaaggctaccatgaacaagaggcagctacaaccnnnnnnnnnnnnnnnnnnnnnnnnnnnnnnnnnnnnnnnnnnnnnnnnnnnnnnnnnnnnnnnnnnnnnnnnnnnnnnnnnnnnnnnnnnnnnnnnnnnnnnnnnnnnnnnnnnnnnnnnnnnnnnnnnnnnnnnnnnnnnnnnnnnnnnnnnnnnnnnnnnnnnnnnnnnnnnnnnnnnnnnnnnnnnnnnnnnnnnnnnnnnnnnnnnnnnnnnnnnnnnnnnnnnnnnnnnnnnnnnnnnnnnnnnnnnnnnnnnnnnnnnnnnnnnnnnnnnnnnnnnnnnnnnnnnnnnnnnnnnnnnnnnnnnnnnnnnnnnnnnnnnnnnnnnnnnnnnnnnnnnnnnnnnnnnnnnnnnnnnnnnnnnnnnnnnnnnnnnnnnnnnnnnnnnnnnnnnnnnnnnnnnnnnnnnnnnnnnnnnnnnnnnnnnnnnnnnnnnnnnnnnnnnnnnnnnnnnnnnnnnnnnnnnnnnnnnnnnnnnnnnnnnnnnnnnnnnnnnnnnnnnnnnnnnnnnnnnnnnnnnnnnnnnnnnnnnnnnnnnnnnnnnnnnnnnnnnnnnnnnnnnnnnnnnnnnnnnnnnnnnnnnnnnnnnnnnnnnnnnnnnnnnnnnnnnnnnnnnnnnnnnnnnnnnnnnnnnnnnnnnnnnnnnnnnnnnnnnnnnnnnnnnnnnnnnnnnnnnnnnnnnnnnnnnnnnnnnnnnnnnnnnnnnnnnnnnnnnnnnnnnnnnnnnnnnnnnnnnnnnnnnnnnnnnnnnnnnnnnnnnnnnnnnnnnnnnnnnnnnnnnnnnnnnnnnnnnnnnnnnnnnnnnnnnnnnnnnnnnnnnnnnnnnnnnnnnnnnnnnnnnnnnnnnnnnnnnnnnnnnnnnnnnnnnnnnnagaacacaggtacatcttcagatccagctcccacgaacacaacaacatcatcaaccaacatctgcacgcaaggtccaaaagtttattatgagtacaaccgaccccatgtactcaatgagtatcaaacctaaccttaggttgaaaatagtgacgagcttgtaccaaggtcgggtccaccaccaattaccaacaacagttcataataacgtaaagcaagtaatacatgaagtaacttagagataagatgctcagcaaaatcatgatttccgaaaatagttctgcctttttgaaaacaataattttcccaaaaatcttttcaataataataaataagatgtttcattttcttttcagataaccagtgtaatacaaatgcatcactatgcccacctgtcaacatgtgtgagaaaccatgaatgacgtgatagcgtacaatatgaggaaaatacatctctatgcctgtatgtcatgtatgcatgtcaatgcaatgtatctcagagatgaactcgtgtactgacactctcagagtactcaatctcactttatcacacattccactcatcatgcccaatcactcagtactgtacatggccaatccggcccagggaagatccatctcggaatatacacatcaactgatcatcagtcactcagtaccaagtagggccaatccagcccgtggagaagatccatctccagggaagatccatctcggaatatacacatcaactgatcatcagtcactcagtaccaagtagggccaatccagcccgtggagaagatccatctccaggtatataatgcttcggacaatatccatgtccagggaagatccatccctcaataataaaaaccacactcactgggggtgtacagactctggaggggctcctacagcccaagtgctataatccgcacggacaactcatgtgctgcacagacaactcacgtgccataatatcaatatctggatctgcacggacaactcacgtgctatagtatcaatatcagaatcaatcgggccctcggcctcactcagtcagcaatctctccagtctctctcacgggctaacaatgtcatgaaactagcccgaaaatgatgatatgatgtatcaataaataacaacagagtctgagatatgatacgcaatgaaatgaatatgactgagtataaattttcaattcaaaataaaaaattcacaacaatatgacctatgtgggtcccaataatactggcacatagcctcaacatgattatttatactgcatagaaaatgccaagattatttgactacaaaattccacgaaaataattacgtcataatttctatggtgcacgcccacacgcctgtcacctagcatgcacgtcacctcccaaaaattcacataatacatatattcagggttcataacctcagctccaagattagaagagttacttacctcgaacaagacgaatccaattccgagcaaggtaaacaatgctctagaaattccattctacgggtattaactcctgaacgactccaatctagtcacaattaatttgatttagtccacacaatttataggatataattccatataaaaaaactaatattttcccacaaaatctgaaattacactccgaaaatcgcccgtggagcccacgtctcggaatccaacgaaactcacaaaatccgacaacccagcaaattataagttcaaccatactaatttcactcaattccgactccaaatcgatgttcaaaactcaaatattcgtattatgaactttaggccaacacccccaattttctctttaaattcatcaaccatttgcttaaaatgaagatagattcatggaatataatcacaagggagtcaagaatacttaccccaagttgtgtggaataattcctctccaaagtcacccaaaatgagctccaaaatccaaaaatgggtgaaaatatcgaaccctcgaacttaaagggttctgcccaggcnnnnnnnnnnnnnnnnnnnnnnnnnnnnnnnnnnnnnnnnnnnnnnnnnnnnnnnnnnnnnnnnnnnnnnnnnntgcgcacccacttctgcggaaaaatgtcgcacctgtgctgccctgcttcctcaccattttccgcttatgcgaatcactacccacatctgtgcaatcgcaggtgcagaaatccaatcgcacctgcgacctctgttgacaccctccaactcctcacctgcgctcgagctgccgcacctgcggccaagaccctcacaggtgcgatcacaccagaagggctacaacttcagcaacctcactactcaaacttttgatccgttaatcatccgaaactcgcccgaggcccccgggacctcaaccaaatacaccagtaagtgctaaaacaaaccacagacctactcgaggcctctaattatatcaaacaacatcaaaacgacgaatcataccccaattcaaaatctatgaactttgtactttgaattctatgtcttgtgccgaaacatatcaaataaatctaaaatgacgtcaatttttttacacaagtcacattacagacctattccaattttcagaatcgaatttcgaccccgatatcaaaaagtcaactcccccgtcaaacttcccaaaaattcaactttctccatttcaagccaaattccactacgtacttccaaatatcaatatctggatatgcacgaacaactcacgtgctgcacagacaactcacaggccataatatcaatatctagatctgcacggacaactcacgtgctgcacagacaactcacgttctatagtatcaatatcataatcaatcaggccctcggcctcactcagtcatcaatatctggatcggcaaggacaactcatgtgcttcaaagacaactcacgtggcataatattaatatctggatctacacggacaactcacatgctatagtatcaatatcggaatcaatcaggccctcggcctcactcagtcatcaatctctccagtctctctctcacgggctcacaatgtcatgaaactagcccgaaaatgatgatatgatgtatcaataaataacaacagagactgagatatgatatgcaatgaaatgaatatgactgagtataaattttcaatttaaaataaataattcacatcaatatgacctatgtgggtcccaataatactggcacatagcctcaacatgattatttatatgattctcagctaaaattcttcaacatataaaactgcatagaaaatgccaagattatttgactacaaaattcaaaggaaataattacgtcacactttctatggtgcacgcccacacgcccgtcacctaccatgcgtgtcacctcccaacaattcacataatacatatattcagggttcataccctcagctccaagattagaagagttacttacctcaaacaagacgannnnnnnnnnnnnnnnnnnnnnnnnnnnnnnnnnnnnnnnnnnnnnnnnnnnnnnnnnnnnnnnnnnnnnnnnnnnnnnnnnnnnnnnnnnnnnnnnnnnnnnnnnnnnnnnnnnnnnnnnnnnnnnnnnnnnnnnnnnnnnnnnnnnnnnnnnnnnnnnnnnnnnnnnnnnnnnnnnnnnnnnnnnnnnnnnnnnnnnnnnnnnnnnnnnnnnnnnnnnnnnnnnnnnnnnnnnnnnnnnnnnnnnnnnnnnnnnnnnnnnnnnnnnnnnnnnnnnnnnnnnnnnnnnnnnnnnnnnnnnnnnnnnnnnnnnnnnnnnnnnnnnnnnnnnnnnnnnncgcttctgcggaaaaatgtcgcacctgcgctgccctgcttcctcaccattttccgcttctacgaatcactacccgcatctgcgccatcataggtgcggaaatccaatcgcacctgtgacctctgttgacaccctccaattcctcacctgcgctcgagctgctgcacctgcggtcaagacccttataggtgcgatcacaccagaagggctacaactttagcaacctcactactcaaacttttgatccgttaatcatccgaaacttgctcgaggcccccaggacctcaaccaaatacaccaataggtgctaaaacataccacagacctactcgaggcctctaattacatcaaacaacatcaaaacgacgaatcataccccaattcaaaatctatgaactttgtactttcgaattctatatcttgtgccaaaacacatcaaataaatctaaaatgacttcaattttttcacacaagtcacatttcacattacggacctattccactttccagaattggatttcgaccccgatatcaaaaagtcaactcccccgtcaaacttctcaaaaatttaacattctccatttcaagccaaattccactacgtacttcaaactatcaatatctggatatgcacggacaactcacgtgctgcacagacaactcacaggccataatatcaatatctggatctgcacagacaactcacgtgctgcacagacaactcacgttctatagtatcaatatcataatcaatcaggcactcggcctcactcagtcatcaatatctggatctgcacggacatatcacgtgcttcaaagacaactcacgtggcataatattaatattcggatctgcacggacaactcacgtgctatagtatcaataacagaatcaatcaggccctcggcctcactcagtcatcaatctctccagtctctctctcacaggctcacaatgtcatgaaactagcccgaaaatgatgatatgatgtatcaataaataacaacagagactgagatatgatatacaatgaaatgaatatgactgagtataaattttcaatttaaaataaataattcaaatcaatatgacctatgtggttcccaataatactggcacatagcctcaacatgattatttatatgattctcagctaaaattcttcaacatataaaactgcatagaaaatgccaagattatttgactacaaaattccacaaaaataattacgtcataatttctatggtgcacgcccacatgcccgtcacctaccatgcgcgtcacctcccaacaattcacataatacatatattcagggttcataccatcagctccaagagtagaagagttacttacctcaaacaagacgaatccaattccgagcaaggtcaaaaatactctagaaatttcattatgcgcgtatcaactcctgaacagctcgaatctagtcacaattaatttgatttagtccacacaatttataggatataattccatatcaaaaaactaatattttcccacaaaatctgnnnnnnnnnnnnnnnnnnnnnnnnnnnnnnnnnnnnnnnnnnnnnnnnnnnnnnnnnnnnnnnnnnnnnnnnnnnnnnnnnnnnnnnnnnnnnnnnnnnnnnnctcacgtctcggaatccgatgaaactcacaaaatccaacaccccatcaaattacaagttaaaccatactaatcacactattccgactccaaaacgatgttcaaaactcaaaaatacgtattatgaactttaggccaacacccacaattttctctttaaattcatcaaccaattgcttaaaatgaagatagattcatggaatataatcacaagggagtcaagaacacttaccccaagttnnnnnnnnnnnnnnnnnnnnnnnnnnnnnnnnnnnnnnnnnnnnnnnnnnnnnnnnnnnnnnnnnnnnnnnnnnnnnnnnnnnnnnnnnnnnnnnnnnnnnnnnnnnnnnnnnnnnnnnnnnnnnnnnnnnnnnnnnnnnnnnnnnnnnnnnnnnnnnnnnnnnnnnnnnnnnnnnnnnnnnnnnnnnnnnnnnnnnnnnnnnnnnnnnnnnnnnnnnnnnnnnnnnngactccaaatcgatgttcaaaactcaaaaattcttattatgagctttaggccaacacccacaattttctctttaaattcatctaccaattgcttaaaatgaagatagattcatggaatataatcacaaaggagtcaagaacacttaccccaagttgtgtggaagaattcctctccaaagtcacccaaaatgagctccaaaatccaaaaatgggtgaaaatannnnnnnnnnnnnnnnnnnnnnnnnnnnnnnnnnnnnnnnnnnnnnnnnnnnnnnnnnnnnnnnnnnnnnnnnnnnnnnnnnnnnnnnnnnnnnnnnnnnnnnnnnnnnnnnnnnnnnnnnnnnnnnnnnnnnnnnnnnnnnnnnnnnnnnnnnnnnnnnnnnnnnnnnnnnnnnnnnnnnnnnnnnnnnnnnnnnnnnnnnnnnnnnnnnnnnnnnnnnnnnnnnnnnnnnnnnnnnnnnnnnnnnnnnnnnnnnnnnnnnnnnnnnnnnnnnnnnnnnnnnnnnnnnnnnnnnnnnnnnnnnnnnnnnnnnnnnnnnnnnnnnnnnnnnnnnnnnnnnnnnnnnnnnnnnnnnnnnnnnnnnnnnnnnnnnnnnnnnnnnnnnnnnnnnnnnnnnnnnnnnnnnnnnnnnnnnnnnnnnnnnnnnnnnnnnnnnnnnnnnnnnnnnnnnnnnnnnnnnnnnnnnnnnnnnnnnnnnnnnnnnnnnnnnnnnnnnnnnnnnnnnnnnnnnnnnnnnnnnnnnnnnnnnnnnnnnnnnnnnnnnnnnnnnnnnnnnnnnnnnnnnnnnnnnnnnnnnnnnnnnnnnnnnnnnnnnnnnnnnnnnnnnnnnnnnnnnnnnnnnnnnnnnnnnnnnnnnnnnnnnnnnnnnnnnnnnnnnnnnnnnnnnnnnnnnnnnnnnnnnnnnnnnnnnnnnnnnnnnnnnnnnnnnnnnnnnnnnnnnnnnnnnnnnnnnnnnnnnnnnnnnnnnnnnnnnnnnnnnnnnnnnnnnnnnnnnnnnnnnnnnnnnnnnnnnnnnnnnnnnnnnnnnnnnnnnnnnnnnnnnnnnnnnnnnnnnnnnnnnnnnnnnnnnnnnnnnnnnnnnnnnnnnnnnnnnnnnnnnnnnnnnnnnnnnnnnnnnnnnnnnnnnnnnnnnnnnnnnnnnnnnnnnnnnnnnnnnnnnnnnnnnnnnnnnnnnnnnnnnnnnnnnnnnnnnnnnnnnnnnnnnnnnnnnnnnnnnnnnnnnnnnnnnnnnnnnnnnnnnnnnnnnnnnnnnnnnnnnnnnnnnnnnnnnnnnnnnnnnnnnnnnnnnnnnnnnnnnnnnnnnnnnnnnnnnnnnnnnnnnnnnnnnnnnnnnnnnnnnnnnnnnnnnnnnnnnnnnnnnnnnnnnnnnnnnnnnnnnnnnnnnnnnnnnnnnnnnnnnnnnnnnnnnnnnnnnnnnnnnnnnnnnnnnnnnnnnnnnnnnnnnnnnnnnnnnnnnnnnnnnnnnnnnnnnnnnnnnnnnnnnnnnnnnnnnnnnnnnnnnnnnnnnnnnnnnnnnnnnnnnnnnnnnnnnnnnnnnnnnnnnnnnnnnnnnnnnnnnnnnnnnnnnnnnnnnnnnnnnnnnnnnnnnnnnnnnnnnnnnnnnnnnnnnnnnnnnnnnnnnnnnnnnnnnnnnnnnnnnnnnnnnnnnnnnnnnnnnnnnnnnnnnnnnnnnnnnnnnnnnnnnnnnnnnnnnnnnnnnnnnnnnnnnnnnnnnnnnnnnnnnnnnnnnnnnnnnnnnnnnnnnnnnnnnnnnnnnnnnnnnnnnnnnnnnnnnnnnnnnnnnnnnnnnnnnnnnnnnnnnnnnnnnnnnnnnnnnnnnnnnnnnnnnnnnnnnnnnnnnnnnnnnnnnnnnnnnnnnnnnnnnnnnnnnnnnnnnnnnnnnnnnnnnnnnnnnnnnnnnnnnnnnnnnnnnnnnnnnnnnnnnnnnnnnnnnnnnnnnnnnnnnnnnnnnnnnnnnnnnnnnnnnnnnnnnnnnnnnnnnnnnnnnnnnnnnnnnnnnnnnnnnnnnnnnnnnnnnnnnnnnnnnnnnnnnnnnnnnnnnnnnnnnnnnnnnnnnnnnnnnnnnnnnnnnnnnnnnnnnnnnnnnnnnnnnnnnnnnnnnnnnnnnnnnnnnnnnnnnnnnnnnnnnnnnnnnnnnnnnnnnnnnnnnnnnnnnnnnnnnnnnnnnnnnnnnnnnnnnnnnnnnnnnnnnnnnnnnnnnnnnnnnnnnnnnnnnnnnnnnnnnnnnnnnnnnnnnnnnnnnnnnnnnnnnnnnnnnnnnnnnnnnnnnnnnnnnnnnnnnnnnnnnnnnnnnnnnnnnnnnnnnnnnnnnnnnnnnnnnnnnnnnnnnnnnnnnnnnnnnnnnnnnnnnnnnnnnnnnnnnnnnnnnnnnnnnnnnnnnnnnnnnnnnnnnnnnnnnnnnnnnnnnnnnnnnnnnnnnnnnnnnnnnnnnnnnnnnnnnnnnnnnnnnnnnnnnnnnnnnnnnnnnnnnnnnnnnnnnnnnnnnnnnnnnnnnnnnnnnnnnnnnnnnnnnnnnnnnnnnnnnnnnnnnnnnnnnnnnnnnnnnnnnnnnnnnnnnnnnnnnnnnnnnnnnnnnnnnnnnnnnnnnnnnnnnnnnnnnnnnnnnnnnnnnnnnnnnnnnnnnnnnnnnnnnnnnnnnnnnnnnnnnnnnnnnnnnnnnnnnnnnnnnnnnnnnnnnnnnnnnnnnnnnnnnnnnnnnnagttgcccaaaatgagctccaaaatccaaaaatgggagaaaatatcgaaccctcgaacttaaagcattctgcccaggcttttcgcacccgcttctgcgaaaaaatgtcgcacctgcgaccactgttgacaccctccaactcctcacctacgctcgagctgccgcacctgcggccaagaccctcacaggtgtgatcacaccagaagggctacaacttcagcaacctcactactcaaacttttgatccgttaatcatccgaaactcgcccgaggcccccgggacctcagccagatacaccaataagtgctaaaacataccacggacctactcgaggcctctaattgcatcaaacaacatcaaaatgacgaatcatacaccaattcaaaatctatgaactttgtactttcgaattctatatcttgtgccgaaacacatcaaataaatctaaaatgacttcaattttttcacacaagtaacatttcacattacggacctattccaatttccagaatctgattacgaccccaatatcaaaaagtcaactcccccgtcaaacttcccaaaaattcaactttcgccatttcaagccaaattccactacggacttccaaatatcaatatctggatatccacggacaactcacatgctgcacagacaactcacatgccataatatcaatatctggatctgcatggacaactcatgtgctgcacagacaactcacgttctatagtatcaatatcataataaatcaggctctcggcctcactcagtcatcaatatctggatctgcaaagacnnnnnnnnnnnnnnnnnnnnnnnnnnnnnnnnnnnnnnnnnnnnnnnnnnnnnnnnnnnnnnnnnnnnnnnnnnnnnnnnnnnnnnnnnnnnnnnnnnnnnnnnnnnnnnnnnnnnnnnnnnnnnnnnnnnnnnnnnnnnnnnnnnnnnnnnnnnnnnnnnnnnnnnnnnnnnnnnnnnnnnnnnnnnnnnnnnnnnnnnnnnnnnnnnnnnnnnnnnnnnnnnnnnnnnnnnnnnnnnnnnnnnnnnnnnnnnnnnnnnnnnnnnnnnnnnnnnnnnnnnnnnnnnnnnnnnnnnnnnnnnnnnnnnnnnnnnnnnnnnnnnnnnnnnnnnnnnnnnnnnnnnnnnnnnnnnnnnnnnnnnnnnnnnnnnnnnnnnnnnnnnnnnnnnnnnnnnnnnnnnnnnnnnnnnnnnnnnnnnnnnnnnnnnnnnnnnnnnnnnnnnnnnnnnnnnnnnnnnnnnnnnnnnnnnnnnnnnnnnnnnnnnnnnnnnnnnnnnnnnnnnnnnnnnnnnnnnnnnnnnnnnnnnnnnnnnnnnnnnnnnnnnnnnnnnnnnnnnnnnnnnnnnnnnnnnnnnnnnnnnnnnnnnnnnnnnnnnnnnnnnnnnnnnnnnnnnnnnnnnnnnnnnnnnnnnnnnnnnnnnnnnnnnnnnnnnnnnnnnnnnnnnnnnnnnnnnnnnnnnnnnnnnnnnnnnnnnnnnnnnnnnnnnnnnnnnnnnnnnnnnnnnnnnnnnnnnnnnnnnnnnnnnnnnnnnnnnnnnnnnnnnnnnnnnnnnnnnnnnnnnnnnnnnnnnnnnnnnnnnnnnnnnnnnnnnnnnnnnnnnnnnnnnnnnnnnnnnnnnnnnnnnnnnnnnnnnnnnnnnnnnnnnnnnnnnnnnnnnnnnnnnnnnnnnnnnnnnnnnnnnnnnnnnnnnnnnnnnnnnnnnnnnnnnnnnnnnnnnnnnnnnnnnnnnnnnnnnnnnnnnnnnnnnnnnnnnnnnnnnnnnnnnnnnnnnnnnnnnnnnnnnnnnnnnnnnnnnnnnnnnnnnnnnnnnnnnnnnnnnnnnnnnnnnnnnnnnnnnnnnnnnnnnnnnnnnnnnnnnnnnnnnnnnnnnnnnnnnnnnnnnnnnnnnnnnnnnnnnnnnnnnnnnnnnnnnnnnnnnnnnnnnnnnnnnnnnnnnnnnnnnnnnnnnnnnnnnnnnnnnnnnnnnnnnccacaaaaataactacgtcacaatttctatggtgcacgcccacacgtccgtcacctaccatgcgcgtcacctcccaacaattcacataatacatatattcagggttcatacccccagctccaagattagaagagttacttacctcaaacaagacgaatccaattccgagcaaggtcaaaaatactctagaaataccattatacgcgtatcaactcttgaacggctcgaatctagtcacaattaatttgatttagtccacacaatttataggatataattccatatcaaaaaactaatattttcccacaaaatctgaaattacactccgaaaatcggtcgtggggcccacgtctcggaatccgacgaaactcacaaaatccgacaacccatcaaattacaagttaaaccatactaatctcactcaannnnnnnnnnnnnnnnnnnnnnnnnnnnnnnnnnnnnnnnnnnnnnnnnnnnnnnnnnnnnnnnnnnnnnnnnnnnnnnnnnnnnnnnnnnnnnnnnnnnnnnnnnnnnnnnnnnnnnnnnnnnnnnnnnnnnnnnnnnnnnnnnnnnnnnnnnnnnnnnnnnnnnnnnnnnnnnnnnnnnnnnnnnnnnnnnnnnnnnnnnnnnnnnnnnnnnnnnnnnnnnnnnnnnnnnnnnnnnnnnnnnnnnnnnnnnnnnnnnnnnnnnnnnnnnnnnnnnnnnnnnnnnnnnnnnnnnnnnnnnnnnnnnnnnnnnnnnnnnnnnnnnnnnnnnnnnnnnnnnnnnnnnnnnnnnnnnnnnnnnnnnnnnnnnnnnagcgttctgcccgggcttttcgcacccgcttgtgcggaaaaatgtcgcacctgcactgccctgcttcctcaccattttccgcttctacgaatcaatcaatcgcaggtacggaaatccaatcgaacctacgaccactgttgacaccctccaactcctcacctgcgctcgagctaccgcacctgtggccaagaccctcacaggtgcgatcacaccagaagggctacaacttnnnnnnnnnnnnnnnnnnnnnnnnnnnnnnnnnnnnnnnnnnnnnnnnnnnnnnnnnnnnnnnnnnnnnnnnnnnnnnnnnnnnnnnnnnnnnnnnnnnnnnnnnnnnnnnnnnnnnnnnnnnnnnnnnnnnnnnnnnnnnnnnnnnnnnnnnnnnnnnnnnnnnnnnnnnnnnnnnnnnnnnnnnnnnnnnnnnnnnnnnnnnnnnnnnnnnnnnnnnnnnnnnnnnnnnnnnnnnnnnnnnnnnnnnnnnnnnnnnnnnnnnnnnnnnnnnnnnnnnnnnnnnnnnnnnnnnnnnnnnnnnnnnnnnnnnnncttttgaattctatatcttgtgccggaacacatcaaataaatctaaaatgacttcaattttttcacacaagtaacatttcacattacggacctattccaatttccagaatctgattacgaccccgatatcaaaaagtcaactcccccgtcaaacttcccaaaaattcaactttcgccatttcaagccaaattccactacggacttccaaatatcaatatctggatatccacggacaactcacgtgctgcacagacaactcacaggccataatatcaatatctagatctgcatggacaactcacgtgctgcacagacaactcacgttctatagtatcaatatcataataaatcaggctctcggcctcactcagtcatcaatatctggatctgcaaagacaactcacgtggcataatattaatatctggatctgcacggacaactcacgtgctatagtatcaatatcagaatcaatcaggccctcggcctcactcagtcatcaatctctccactctctctctcacgggctcacaatgttatgaaactagcccgaaaatgatgatatgatgtatcaataaataacaacagagactgagatatgatatgcaatgaaataaatatgactgagtgtaaattttcaatttaaaataaataattcacatcaatatgacctatgtgggtcccaataatactggcacatagcctcaacatgattatttatatnnnnnnnnnnnnnnnnnnnnnnnnnnnnnnnnnnnnnnnnnnnnnnnnnnnnnnnnnnnnnnnnnnnnnnnnnnnnnnnnnnnnnnnnnnnnnnnnnnnnnnnnnnnnnnnnnnnnnnnnnnnnnnnnnnnnnnnnnnnnnnnnnnnnnnnnnnnnnnnnnnnnnnnnnnnnnnnnnnnnnnnnnnnnnnnnnnnnnnnnnnnnnnnnnnnnnnnnnnnnnnnnnnnnnnnnnnnnnnnnnnnnnnnnnnnnnnnnnnnnnnnnnnnnnnnnnnnnnnnnnnnnnnnnnnnnnnnnnnnnnnnnnnnnnnnnnnnnnnnnnnnnnnnnnnnnnnnnnnnnnnnnnnnnnnnnnnnnnnnnnnnnnnnnnnnnnnnnnnnnnnnnnnnnnnnnnnnnnnnnnnnnnnnnnnnnnnnnnnnnnnnnnnnnnnnnnnnnnnnnnnnnnnnnnnnnnnnnnnnnnnnnnnnnnnnnnnnnnnnnnnnnnnnnnnnnnnnnnnnnnnnnnnnnnnnnnnnnnnnnnnnnnnnnnnnnnnnnnnnnnnnnnnnnnnnnnnnnnnnnnnnnnnnnnnnnnnnnnnnnnnnnnnnnnnnnnnnnnnnnnnnnnnnnnnnnnnnnnnnnnnnnnnnnnnnnnnnnnnnnnnnnnnnnnnnnnnnnnnnnnnnnnnnnnnnnnnnnnnnnnnnnnnnnnnnnnnnnnnnnnnnnnnnnnnnnnnnnnnnnnnnnnnnnnnnnnnnnnnnnnnnnnnnnnnnnnnnnnnnnnnnnnnnnnnnnnnnnnnnnnnnnnnnnnnnnnnnnnnnnnnnnnnnnnnnnnnnnnnnnnnnnnnnnnnnnnnnnnnnnnnnnnnnnnnnnnnnnnnnnnnnnnnnnnnnnnnnnnnnnnnnnnnnnnnnnnnnnnnnnnnnnnnnnnnnnnnnnnnnnnnnnnnnnnnnnnnnnnnnnnnnnnnnnnnnnnnnnnnnnnnnnnnnnnnnnnnnnnnnnnnnnnnnnnnnnnnnnnnnnnnnnnnnnnnnnnnnnnnnnnnnnnnnnnnnnnnnnnnnnnnnnnnnnnnnnnnnnnnnnnnnnnnnnnnnnnnnnnnnnnnnnnnnnnnnnnnnnnnnnnnnnnnnnnnnnnnnnnnnnnnnnnnnnnnnnnnnnnnnnnnnnnnnnnnnnnnnnnnnnnnnnnnnnnnnnnnnnnnnnnnnnnnnnnnnnnnnnnnnnnnnnnnnnnnnnnnnnnnnnnnnnnnnnnnnnnnnnnnnnnnnnnnnnnnnnnnnnnnnnnnnnnnnnnnnnnnnnnnnnnnnnnnnnnnnnnnnnnnnnnnnnnnnnnnnnnnnnnnnnnnnnnnnnnnnnnnnnnnnnnnnttaaagtcatcaaccaattgcttaaaatgaagatagattcatggaatataatcacaagggagtcaagaacacttaccccaagttgtgtggaagaattcctctccannnnnnnnnnnnnnnnnnnnnnnnnnnnnnnnnnnnnnnnnnnnnnnnnnnnnnnnnnnnnnnnnnnnnnnnnnnnnnnnnnnnnnnnnnnnnnnnnnnnnnnnnnnnnnnnnnnnnnnnnnnnnnnnnnnnnnnnnnnnnnnnnnnnnnnnnnnnnnnnnnnnnnnnnnnnnnnnnnnnnnnnnnnnnnnnnnnnnnnnnnnnnnnnnnnnnnnnnnnnnnnnnnnnnnnnnnnnnnnnnnnnnnnnnnnnnnnnnnnnnnnnnnnnnnnnnnnnnnnnnnnnnnagcgttctgcccgggcttttcgcacccgcttgtgcggaaaaatgtcgcacctgcactgccctgcttcctcaccattttccgcttctacgaatcaatcaatcgcaggtacggaaatccaatcgaacctacgaccactgttgacaccctccaactcctcacctgcgctcgagctaccgcacctgtggccaagaccctcacaggtgcgatcacaccagaagggctacaacttnnnnnnnnnnnnnnnnnnnnnnnnnnnnnnnnnnnnnnnnnnnnnnnnnnnnnnnnnnnnnnnnnnnnnnnnnnnnnnnnnnnnnnnnnnnnnnnnnnnnnnnnnnnnnnnnnnnnnnnnnnnnnnnnnnnnnnnnnnnnnnnnnnnnnnnnnnnnnnnnnnnnnnnnnnnnnnnnnnnnnnnnnnnnnnnnnnnnnnnnnnnnnnnnnnnnnnnnnnnnnnnnnnnnnnnnnnnnnnnnnnnnnnnnnnnnnnnnnnnnnnnnnnnnnnnnnnnnnnntagcaaccttgctactcaaacttttgatccgttaatcatccgaaacccgcccgaggcccccgggacctcaaccaaatacacaaataagtgctaaaacataccacggacctactcgaggcctctaattacatcaaacaacatcaaaatgacgaatcataccccaattcaaaatctatgaactttgtacttttgccatttcaagccaaattccactacagacttccaaatatcaatatctggatatccacggataactcacgtgctgcacagacaactcacaggccataatatcaatatcttgatctgcatggacaactcacgtgctgcacagacaactcacgttctatagtatcaatatcataataaatcaggctctcggcctcactcagtcatcaatatctggatctgcaaagacaactcacgtggcataatattaatatctggatctgcacggacaactcacgtgctatagtatcaatatcagaatcaatcaggccctcggcctcactcagtcatcaatctctccactctctctctcacgggctcacaatgttatgaaactagcccgaaaatgatgatatgatgtatcaataaataacaacagagactgagatatgatatgcaatgaaataaatatgactgagtgtaaattttcaatttaaaataaataattcacatcaatatgacctatgtgggtcccaataatactggcacatagcctcaacatgattatttatattgattctcagctcaatttctttaacacataaaactgcatggaaaatgccaagattatttgactacaaaatccacaaaaataactacgtcacaatttctatggtgcacgcccacacgtccgtcacctaccatgcgcgtcacctcccaacaattcacataatacatatattcagggttcatacccccagctccaagattagaagagttacttacctcaaacaagacgaatccaattccgagcaaggtcaaaaatactctagaaataccattatacgcgtatcaactcttgaacggctcgaatctagtcacaattaatttgatttagtccacacaatttataggatataattccatatcaaaaaactaatattttnnnnnnnnnnnnnnnnnnnnnnnnnnnnnnnnnnnnnnnnnnnnnnnnnnnnnnnnnnnnnnnnnnnnnnnnnnnnnnnnnnnnnnnnnnnnnnnnnnnnnnnnnnnnnnnnnnnnnnnnnnnnnnnnnnnnnnnnnnnnnnnnnnnnnnnnnnnnnnnnnnnnnnnnnnnnnnnnnnnnnnnnnnnnnnnnnnnnnnnnnnnnnnnnnnnnnnnnnnnnnnnnnnnnnnnnnnnnnnnnnnnnnnnnnnnnnnnnnnnnnnnnnnnnnnnnnnnnnnnnnnnnnnnnnnnnnnnnnnnnnnnnnnnnnnnnnnnnnnnnnnnnnnnnnnnnnnnnnnnnnnnnnnnnnnnnnnnnnnnnnnnnnnnnnnnnnnnnnnnnnnnnnnnnnnnnnnnnnnnnnnnnnnnnnnnnnnnnnnnnnnnnnnnnnnnnnnnnnnnnnnnnnnnnnnnnnnnnnnnnnnnnnnnnnnnnnnnnnnnnnnnnnnnnnnnnnnnnnnnnnnnnnnnnnnnnnnnnnnnnnnnnnnnnnnnnnnnnnnnnnnnnnnnnnnnnnnnnnnnnnnnnnnnnnnnnnnnnnnnnnnnnnnnnnnnnnnnnnnnnnnnnnnnnnnnnnnnnnnnnnnnnnnnnnnnnnnnnnnnnnnnnnnnnnnnnnnnnnnnnnnnnnnnnnnnnnnnnnnnnnnnnnnnnnnnnnnnnnnnnnnnnnnnnnnnnnnnnnnnnnnnnnnnnnnnnnnnnnnnnnnnnnnnnnnnnnnnnnnnnnnnnnnnnnnnnnnnnnnnnnnnnnnnnnnnnnnnnnnnnnnnnnnnnnnnnnnnnnnnnnnnnnnnnnnnnnnnnnnnnnnnnnnnnnnnnnnnnnnnnnnnnnnnnnnnnnnnnnnnnnnnnnnnnnnnnnnagcgttctgcccgggcttttcgcacccgcttgtgcggaaaaatgtcgcacctgcactgccctgcttcctcaccattttccgcttctacgaatcaatcaatcgcaggtacggaaatccaatcgaacctacgaccactgttgacaccctccaactcctcacctgcgctcgagctaccgcacctgtggccaagaccctcacaggtgcgatcacaccagaagggctacaacttnnnnnnnnnnnnnnnnnnnnnnnnnnnnnnnnnnnnnnnnnnnnnnnnnnnnnnnnnnnnnnnnnnnnnnnnnnnnnnnnnnnnnnnnnnnnnncagcaaccttgctactcaaacttttgatccgttaatcatccgaaacccgcccgaggcccccgggacctcaaccaaatacaccaataagtgctaaaacataccacggacctactcgaggcctctaattacatcaaacaacatcaaaacgacgaatcataccccaattcaaaatctatgaactttgtannnnnnnnnnnnnnnnnnnnnnnnnnnnnnnnnnnnnnnnnnnnnnnnnnnnnnnnnnattttgaattctatatcttgtgccgaaacacatcaaataaatctaaaatgacttcaattttttcacacaagtaacatttcacattacggacctattccaatttccagaatctgattacgaccccgatatcaaaaagtcaactcccccgtcaaacttcccaaaaattcaactttcgccatttcaagccaaattccactacggacttccaaatatcaatatctggatatccacggacaactnnnnnnnnnnnnnnnnnnnnnnnnnnnnnnnnnnnnnnnnnnnnnnnnnnnnncacgtgttgcacaaataactcacaggccataatatcaatatctggatctgcatggacaactcacgtgctgcacagacaactcacgttctatagtatcaatatcataataaatcaggctctcggccttactcagtcatcaatatctagatctgcaaagacaactcacgtggcataatattaatatctggatctgcaccgacaactcacgtgctatagtgtcaatatcagaatcaatcaggctctcggcctcactcagtcatcaatatctccactctctctctcacgggctcacaatgtcatgaaactagcacgaaaatgatgatatgatgtatcaataaataacaacagagactcagatatgatatgcaatgaaatgaatatgactgtgtgtaaattttcaatttaaaataaataattcacatcaatatgacctatgtgggtcccaataatactgacacatagcctcaacatgattatttatatgattctcagcaaaacttcttcaacatataaaacttcatagaaaatgccaagattatttgactacaaaattccacggaaataattacgtcacaatttctatggtgcacgcccacacgcccgtcacctaccatgcgcgtcacctcccaacatttcacataataatatattcagggttcataccctcagctccaagattagaagagttacttatctcaaacaagatgaatccaattccgagcaaggttaaaaatactctagaaattccattatgcgcgtatcaactcctgaatggctcgaatctagttacaattagtttgatttagtccacacaatttataggatataattccatatcaaaaaactaatattttcccacaaaatctgaaattacactccgaaaatcgcccgtggtgcccacatcttggaatccgacgaaactcacaaaatcggacaacccatcaaattacaagttaaaccatactaatctcactcaattccgactcaaaatcgatgttcaaaactcaaaaattcgtattatgaactttaggccaacacccacaatttactctttaaatttatcaaccaattgcttaaaatgaagatagattaatggaatataatcacaagggagtcaagaatacttaccccaagttgtgtggaagaattcctctccaaagtcgcccaaaatgagctccaaaatccaaaaatgagtgaaaatatccaaccctcgaacttaaagcgttctgcccaggcttttcgcacccgcttctgcggaaaaatgtcgcacctgcgctgccttgcttcctcaccattttccgcttctgcgaatcaatacccgcatctgcgcaatcgcaggtgcggaaatccaatcgcacctgcgaccactgttgacaccctccaactcctcacctgcgctcgagctgccgcacctgtggccaagaccctcacaggtgcgatcacaccagaagggctacaacttcagcaaactcactactcaaacttttgatccgttaatcatccgaaattcgcccaaggcccccgggacctcaaccaaatacaccaataagtgctaaaacataccacggacctactcgaggcctctaattacatcaaacaatatcaaaatgacgaatcataccctaattcaaaatctatgaactttgtactttcaaattccatatcttgtgccgaaacacatcaaatcaatccagaatgacttcaaatgtttcacacaagtcacatttcacatgtcagacctattccaatttccagaatcggattacgaccccgatatcaaaaagtcaactcccccgtcaaacttcccaaaaattcaactttcgcaatttcaagccaaattccactacggacttccaaatatcaatatctggatatgcacggacaactcacgtgctgcacagacaactcacatgccataatatcaatatctggatctgcatggacaactcacgtactgcacagacaactcatattctatagtatcaatatcataaacaatcaggccctcagcctgactttgccatcaatatctggatctgcacggacaaatcacttgcttcaaagacaactcacgtgccataatattaatatctggatttgcacggacaactcacacgctatagtatcgataagagaatcaatcaggccctcggcctcactaagtcatcaatctctccagtctctctcacaggctcacaatgccatgaaactagcccgaaaatgatgatatgatgtatcaataaataacaacagagactgagaaatgatatgcaatgaaatgaatatgaatgagtataaattttcaatttaaaataaataattcacatcaatatgacctatgtgggtcccaataatactggcacatagcctcaacatgattatttatatgattctcagctaaaattcttcaacatataaaactgcatagaaaatgccaagattatttgactacaaaattccacgaaaataattacgtcacaaattctatggtgcacgcctacacgcccgtcacctaccatgcacgtcacctcccaacaattcacataatacatatattcagggttcataccctcagctccaagattagaagagttacttacctcaaacaagacgannnnnnnnnnnnnnnnnnnnnnnnnnnnnnnnnnnnnnnnnnnnnnnnnnnnnnnnnnnnnnnnnnnnnnnnnnnnnnnnnnnnnnnnnnnnnnnnnnnnnnnnnnnnnnnnnnnnnnnnnnnnnnnnnnnnnnnnnnnnnnnnnnnnnnnnnnnnnnnnnncgaatctattcacaattagtttgatttagtccacaaaatttataggatataattccatataaaaaactaatattttcccacaaaatctaaaattacactccgaaaattgcccgtggggcccacgtctcggaatccgacgaaactcacaaaatccgacaacccatcaaattacaagttaaaccatactaatctcactcaannnnnnnnnnnnnnnnnnnnnnnnnnnnnnnnnnnnnnnnnnnnnnnnnnnnnnnnnnnnnnnnnnnnnnnnnnnnnnnnnnnnnnnnnnnnnnnnnnnnnnnnnnnnnnnnnnnnnnnnnnnnnnnnnnnnnnnnnnnnnnnnnnnnnnnnnnnnnnnnnnnnnnnnnnnnnnnnnnnnnnnnnnnnnnnnnnnnnnnnnnnnnnnnnnnnnnnnnnnnnnnnnnnnnnnnnnnnnnnnnnnnnnnnnnnnnnnnnnnnnnnnnnnnnnnnnnnnnnnnnnnnnnnnnnnnnnnnnnnnnnnnnnnnnnnnnnnnnnnnnnnnnnnnnnnnnnnnnnnnnnnnnnnnnnnnnnnnnnnnnnnnnnnnnnnnnnnnnnnnnnnnnnnnnnnnnnnnnnnnnnnnnnnnnnnnnnnnnnnnnnnnnnnnnnnnnnnnnnnnnnnnnnnnnnnnnnnnnnnnnnnnnnnnnnnnnnnnnnnnnnnnnnnnnnnnnnnnnnnnnnnnnnacgtattatgaactttaggccaacatccacaattgtctctttaaattcatcaaccaattgcttaaaatgaggatagattcatggaatataatcacaagggagtcaagaacacttatcccaagttgtgtggaagaattcctctccaaagtcgcccaaaatgagctccaaaatccaaaaatgggtgaaaatatcgaaccctcgaacttaaagggttctgcccaggcttttcgtacctgcgcacccgcttctgcggaaaaatgtcgcacctgcgccgccctgcttcctcaccattttccgcttctacgaatcactacccgcatttgcgcaatcgcaggtgcggaaatccaatcacacctgcgacctttgttgacaccctctaactcctcacctgcgctcgagctgccgcacctgcggccaagaccctcacatgtgcgatcacaccagaagggctacaacttcagcaacctcactactcaaacttttgatctgttaatcatccgaaactcgcccgaggcccctgggacctcaacaaaatacaccaataagtgctaaaacataccacggacctactcgaggcctctaattgcatcaaacaacatcaaaacgacgaatcataccccaattcaaaatctatgaactttgtactttcaaattctatatcttgtgccgaaacacatcaaataaatctaaaatgacttcaattttttcacacaagtcacatttcacattacagacctattccaatttccagaatcggattacgaccccgatatcaaaaagtcaactcccccgtcaaacttcccaaaaattcaactttcgccatttcaaaccaaattccactacggacttccaaataattttccggacacgctcttaagtccaaaataaccatacagagctattaaaatcatcatatttcaaatctgaggtcgtctacacataagtcaacatccggtcgacttttccaacttaagttttccattatgagactaagtgtctcaattcattccgaaatccttccatacccgaactaactaatccaataggtcataattcaataataaagcataaatagagtaataaatgtggaaatggggttgtaatacctaaaacgaccggccgagtcgttacactatcactgctatttgttctctattatttctatgttatattgcacaggttatttgactagtgagtgtcttgactgtacttcgtcactactccaccgaggttagtcttgatacttactggttaccgactgtggtgtactcatactacacttctgcatatttttgtgcagagccaggtaaattggagttaggtgatcgctagttagctgtacagatcttgctgtggagactcaaggtaaacctgttgctgcgttcgcaggcttcggtgtcaccttccgatattgttcttgcactattttatttctacttaagaaacagttttatttataggttttctagtaactcaatagagcttatgacttgtactaccggttttggcattttatgtattatatagagatttctactttgcatttgttagccgttaattaatattgttattattttagtaaatattaggcttacgtagtccctaagactaggttccatcacgacatcttatggagggagatttgggtcgtgacaagttggtatcagagccctaggttaataagtgctacgagtcataagcgagtttagtagagtcttgcgtatcggtacggagacgtctgtacttatctttaagaggctacgaaactattaggatagtttcacttcttttattcctatcgtgcaagtttattgatctcggagtttgagttatttttgtcattctatgctttcacagatggtgaggacacgagctgcagttgccgatgatgcttccccaagaggagatgatgctaggggcagagatagaggaagaggccgaagaggagcacgtaacccaattagggcacctaccagagcagcagttgaggagccgctagtatctccggttgggggataggtaccggaggcgcatgctgttacccctgcacttcaggagactttagcatagttcctgaacctgtttggtacattaactcaggtggggttgattccgatcacaccagctacttcactgaccggggaggaattcagtctcccgccgcctacactacagagaagcatgctcacattgctctgtttcaaggtgtcatggtgacacatcctgtggtcccagttcagcccatggttagggttgcaacatctgaggaagagcagcttagactttcaaggttcaagaagtatgatcctcctactttcagtggtttgccttcatagggtgcacatggctttctagaagagtgccatcgcattctccgtactattagtattgtggagatgagtggtgttgcgtttactacattatagctcagggaagcggcttatcagtggtggcgggcgtatgagttgggtagcccagtcgatgcagctccactttcatggactcagtttttagagatattcctgagggagtttgttcctcagtttcttcgagattcttggcgcgcagagtttgggaaactgcgccagagtaatatgacagtgtcatagtatgccattagatgaagtgatttagccagatatacacctgctttggttgctacagttagggagcaagtccgtaggttcattgaggggctcaggcgtgatattcggttcaacatggctcgggagttggagtccgatgtttcattttagcagatggtaaagatcgctcgctgattagagggtatgtgggaccaagagagagaggacaggcagggtcaggaaagagatggcaggcgaggtcaggagagagaggacagggaggcgaggaggcctcacagaccggagagatatgctggtccttattttggaggcaggtgtaatgactcgatcgatccttttgagagtaatagccctgatcccctataaaatacttttctcatatctattttttgctattatgacttgtcgggaggtttcgttttggtttttggactgttttggacaattagtccctaaaatttggaccgtagttggaacagtgtgaatatggcgaccaaatggaattacttcaattccgttagctccgttgggtgattttgggcttaggggcgtgtttagattgtgttttggaggtccgtagctcaattaggcttgaaatggtgaaagtcaattttttggagttttggaccggtagtgaaatttttgatatcggggtcggattccgattctgaaagttggggtaggtacataatgttgatttggagttgcgtgcaatatttggggtcaatcggatgtgatttggttggttttggcatcagttgtcttatttggaagtctcaagttctttaagtttgaatcggaggatgattcatgattttagcattgtttgatttgatttgagggctcgactaagtttgtatgatgttttaggattggttagtatgtttggttgaggtcctgcgggcctcgggtgagtttcagggtgatttgtgagcgagtaggggcatttcagcactctaatgttgttctgggggtctttggaagtgcggaccgcacattttaggagtgctgaggcataaggtaagtgcggaccttaggggaaataaagttgtagcccttcgtgtcttgtttccagaaaggtaaataactcatcatgtggacatctgtaaagaaacttatggctaaaatactaaagcctggcagtgcagtcaccaagagagtgtgtctgcacaaattttgtgtgaccgcaggagctggtatgtgcgaccgcacttggaattgtgcggactgcacatggtgagctcatagaatgtactatataacctaggcttaggttattatttcatttttggaccttgggagctcggttggagacgaattttcgtgggtttttcaagaaattcatcggggtaggtgattctaactcggatttggttaatatacatgaatatatcactgattttatcatttaattagtactttgagatggaaatttggggaaaaattgtagaaacttcataaaccacaaattgaggatttgaaggtcgagttgtgatcggcattggctaattttggtatggttggactcgtaagtgaatgcgtgttcatattttgtgacttttaacggatttcgagacgtgggcccggggaggctttttgggtgtttttctaatttcttgctttagctttgctttcattagctagattagtgtcttgtagctatatttatattatgtaattgatttggctagatttgggccactcggagccggatattcgtgggaaaggcattgtgactgattgattgagcttggttcgaggnnnnnnnnnnnnnnnnnnnnnnnnnnnnnnnnnnnnnnnnnnnnnnnnnnnnnnnnnnnnnnnnnnnnnnnnnnnnnnnnnnnnnnnnnnnnnnnnnnnnnnnnnnnnnnnnnnnnnnnnnnnnnnnnnnnnnnnnnnnnnnnnnnnnnnnnnnnnnnnnnnnnnnnnnnnnnnnnnnnnnnnnnnnnnnnnnnnnnnnnnnnnnnnnnnnnnnnnnnnnnnnnnnnnnnnnnnnnnnnnnnnnnnnnnnnnnnnnnnnnnnnnnnnnnnnnnnnnnnnnnnnnnnnnnnnnnnnnnnnnnnnnnnnnnnnnnnnnnnnnnnnnnnnnnnnnnnnnnnnnnnnnnnnnnnnnnnnnnnnnnnnnnnnnnnnnnnnnnnnnnnnnnnnnnnnnnnnnnnnnnnnnnnnnnnnnnnnnnnnnnnnnnnnnnnnnnnnnnnnnnnnnnnnnnnnnnnnnnnnnnnnnnnnnnnnnnnnnnnnnnnnnnnnnnnnnnnnnnnnnnnnnnnnnnnnnnnnnnnnnnnnnnnnnnnnnnnnnnnnnnnnnnnnnnnnnnnnnnnnnnnnnnnnnnnnnnnnnnnnnnnnnnnnnnnnnnnnnnnnnnnnnnnnnnnnnnnnnnnnnnnnnnnnnnnnnnnnnnnnnnnnnnnnnnnnnnnnnnnnnnnnnnnnnnnnnnnnnnnnnnnnnnnnnnnnnnnnnnnnnnnnnnnnnnnnnnnnnnnnnnnnnnnnnnnnnnnnnnnnnnnnnnnnnnnnnnnnnnnnnnnnnnnnnnnnnnnnnnnnnnnnnnnnnnnnnnnnnnnnnnnnnnnnnnnnnnnnnnnnnnnnnnnnnnnnnnnnnnnnnnnnnnnnnnnnnnnnnnnnnnnnnnnnnnnnnnnnnnnnnnnnnnnnnnnnnnnnnnnnnnnnnnnnnnnnnnnnnnnnnnnnnnnnnnnnnnnnnnnnnnnnnnnnnnnnnnnnnnnnnnnnnnnnnnnnnnnnnnnnnnnnnnnnnnnnnnnnnnnnnnnnnnnnnnnnnnnnnnnnnnnnnnnnnnnnnnnnnnnnnnnnnnnnnnnnnnnnnnnnnnnnnnnnnnnnnnnnnnnnnnnnnncgtggcttgcctaaccttatgttggggaactttccttaggatttggtacaatttttgatatatgagctccgtgtacgtgaggtgacgagtgcgtacacagactattattgccaaactccattttcattaagtaaaatacatgtcttcctttaactgagctacactagcacatgaatttatcctgtttagtctagaagaacatgtctacgtgaactctgtgctacatgcttagtgaatttcctacttcttccttgactggtacttaatctaaatcgtacgattttgtgatgtagttgtatttctattatttgcgctgcatatttattttgggactacggacctatattccggtagacccccctactctgcatatttacttcgggactacggaacggtatttcggtagatcctcctgctctgcatatttactttgggactacggaacattattcaggtagatcccccatgctctgcatatttactttgggactacggaacggtattccggtagatctcgccctgtttttgcacatttacgtatgggacggtattctgggagatgccctgttgttatatctatgtactgagctgttgacttgctttgatttcattcttgtttaatttcagtacttatttttactgaaatatttcattcagttttagtttattatatatataccagtagggccctgacctgatatcgtcactactcgaccgaggttaggcttggcacttactgggtaccgttgtggtgtactcatgcccnnnnnnnnnnnnnnnnnnnnnnnnnnnnnnnnnnnnnnnnnnnnnnnnnnnnnnnnnnnnnnnnnnnnnnnnnnnnnnnnnnnnnnnnnnnnnnnnnnnnnnnnnnnnnnnnnnnnnnnnnnnnnnnnnnnnnnnnnnnnnnnnnnnnnnnnnnnnnnnnnnnnnnnnnnnnnnnnnnnnnnnnnnnnnnnnnnnnnnnnnnnnnnnnnnnnnnnnnnnnnnnnnnnnnnnnnnnnnnnnnnnnnnnnnnnnnnnnnnnnnnnnnnnnnnnnnnnnnnnnnnnnnnnnnnnnnnnnnnnnnnnnnnnnnnnnnnnnnnnnnnnnnnnnnnnnnnnnnnnnnnnnnnnnnnnnnnnnnnnnnnnnnnnnnnnnnnnnnnnnnnnnnnnnnnnnnnnnnnnnnnnnnnnnnnnnnnnnnnnnnnnnnnnnnnnnnnnnnnnnnnnnnnnnnnnnnnnnnnnnnnnnnnnnnnnnnnnnnnnnnnnnnnnnnnnnnnnnnnnnnnnnnnnnnnnnnnnnnnnnnnnnnnnnnnnnnnnnnnnnnnnnnnnnnnnnnnnnnnnnnnnnnnnnnnnnnnnnnnnnnnnnnnnnnnnnnnnnnnnnnnnnnnnnnnnnnnnnnnnnnnnnnnnnntttcctgcacatgtttttcgtgtgctgatccaggtaccgcttatcagccgtattatcagtaaggcgaggcagctgttgagacttcaaggtatatctgccgtgttcgcagacctcagagtccctatttactcttccccatgtcaaacacttcttgtatttctttttgttagattctggaatatagaaacactgttctattcccttagcttatgattacgatattccgggttttgggagagttatgtacattttgagagtgacctggtatatatcgagcgatatcttaatttcttatttagaatctacctgtaaattgatagttttagtgtttttgtttcatttccgcgaaggttttaggcttacctagtcgtagagactaggtgccgtcacaatagttcaaggagggataacttgggtcgtgacaagttggtatcggagctctaggttcataggagtcgtgagtcacaagtcggtttattagagtctcgcggatcggtacagagacgtctgtacttatcttcgggaggctatggaactaataggaaaattccacttcatttgtttccttgtcgtgcgagatttttgacttcgaaattctaaacttctgtcttctattctctcacagatggtgaggacacgtgctactggagatgaccaagcacccgcgccccctgctagagccgccagaggtcagggccagggtagaggccgaagacgcccacgtggtgcagccagagcacccaagcgagctgctatagaggaaccaccagcagtcccattcggagcacaggcacctgatatgcctactattactactccagcacttcacgagaccttagcacaattcctgagcatgtttggtacattggttcaggcggggttgattctggttgaaccaactacttcacagaccgggggagggacccaggctcacgccgcccacactccagagcagcaagttcacgttggtcaggttccaggtgtcgtggcgacacagcctggtgtcccattttagcaggtggtagggatcgcttgtcgggtagaggataggtgggtccacgcgagagaggacagacgaggttaggagagagagtacagggaggagaggagacctcatagactggagagatccactggtccttattttgaaggcagggtactacatagtagaggttttgtgggccagccagttcagtttgcatttcaggcttcgcacagtgtttcaagtgttcatgggtctcagggttcccgtagcgcacaattcccacatccaagtcagtagcgaggttgttttgagtgtggcgacactcgccatgtggtgaggattttccccagacttaggagggtgtacctccacagacttctcagccacagcgtgctccaccgggtcctcaggctatgattacagtaccagctgccacctcacctactcagccagctcgaggtggaggtcggggaggtagaggtcaccctagagggggagtccaggccagatgttatgccattcatgctcgtacggaggtagtttcttctgattttgtcattacaggtattgttccggtctgtcatagagatgcatcgctattatttgacctaggctctacatattattattatgtgtcctcttattttgcctcgtatttgggcgtatctcgggattatttgagttttcttgtttatgtgtctactcctgtgggagattctcttgttatggaccgtgtttatcggtcgtgtttgtttactcttagtggttttgagaccagagccaatttattattgctcagcatggtagattttgatgttaacttaggcatggactggttgtttccccattatgctattcttgattgtcacgccaagaccaagacactggctatgccaggtttgccgcgattaaagtggaggggtaccttagattacactcccagttgagttatttcatttgttaaagctcagcgaatggttgagaaggggtgtgacgtgtatctagcctatgtgagagatgtcaatattgatacccttacaattgagtcagtaccagtagtgagggatttccctaatatgtttccagttgatcttctaagcatgccgcccgacagaaatattgatttcgtcattgatttgttgccgggcactcagcccatctctattcctccataccgtatggctccttctgagttgaaggagttgaaggagaagttactgagttgcttgataaggtcttcattcggcctagtgtgtcaccttggggtgctcctgccttatttgtgaagaagaaggatggttctatgcgggtgtgtattgattactgccagttgaacaaagtcacagtgaagaacatgtatccattgcctcgtattgatgacttatttgatcaattacagggtgccagagtgttttcnnnnnnnnnnnnnnnnnnnnnnnnnnnnnnnnnnnnnnnnnnnnnnnnnnnnnnnnnnnnnnnnnnnnnnnnnnnnnnnnnnnnnnnnnnnnnnnnnnnnnnnnnnnnnnnnnnnnnnnnnnnnnnnnnnnnnnnnnnnnnnnnnnnnnnnnnnnnnnnnnnnnnnnnnnnnnnnnnnnnnnnnnnnnnnnnnnnnnnnnnnnnnnnnnnnnnnnnnnnnnnnnnnnnnnnnnnnnnnnnnnnnnnnnnnnnnnnnnnnnnnnnnnnnnnnnnnnnnnnnnnnnnnnnnnnnnnnnnnnnnnnnnnnnnnnnnnnnnnnnnnnnnnnnnnnnnnnnnnnnnnnnnnnnnnnnnnnnnnnnnnnnnnnnnnnnnnnnnnnnnnnnnnnnnnnnnnnnnnnnnnnnnnnnnnnnnnnnnnnnnnnnnnnnnnnnnnnnnnnnnnnnnnnnnnnnnnnnnnnnnnnnnnnnnnnnnnnnnnnnnnnnnnnnnnnnnnnnnnnnnnnnnnnnnnnnnnnnnnnnnnnnnnnnnnnnnnnnnnnnnnnnnnnnnnnnnnnnnnnnnnnnnnnnnnnnnnnnnnnnnnnnnnnnnnnnnnnnnnnnnnnnnnnnnnnnnnnnnnnnnnnnnnnnnnnnnnnnnnnnnnnnnnnnnnnnnnnnnnnnnnnnnnnnnnnnnnnnnnnnnnnnnnnnnnnnnnnnnnnnnnnnnnnnnnnnnnnnnnnnnnnnnnnnnnnnnnnnnnnnnnnnnnnnnnnnnnnnnnnnnnnnnnnnnnnnnnnnnnnnnnnnnnnnnnnnnnnnnnnnnnnnnnnnnnnnnnnnnnnnnnnnnnnnnnnnnnnnnnnnnnnnnnnnnnnnnnnnnnnnnnnnnnnnnnnnnnggctatcatcagttgaagattcgggagccagacatctcaaagactattttcaggactcggtatggtcactacgagttccttgtgatgtcttgtgagctgaccaatgccccaacatcttttatgcacttgattcacagtgtgttccggccttatctcaactcattcatcattgtgattattgacgacattctggtatactcccggagtcgggaggatcatgagcagtatctgaaaataagttatatgaaaaattttctaagtgtgagttttggctagactcagtggaattcttaggccatgtagtatcgagtgatgggatcaaggtggatccgaagaaggtggaagcagtgcagagttggccaagaccgtcataggctacggagatctgtagttttcttggtttggcggggtattaccgtcactttgtagagggattctcatgtattgcagaacctatgaccaggctgacccagaagggtgctctgttcaggtggacaaaggaaagtgaggagagctttcagaagctcaagacagctttaactacaaccccaatattggtattgcctacaggttcggggtcttatactatatattgtgatgcattgcagattggtctcggtgcggtgttgatgcaggacggtagggtgattgcctaagcatccagacaactgaaggtgcatgaaaagaactatcctttccatgaccttgagttagcagctattgttcatgccttgaagatttggcggcattatttgtacggtgttccttgtgagatttacaccgatcannnnnnnnnnnnnnnnnnnnnnnnnnnnnnnnnnnnnnnnnnnnnnnnnnnnnnnnnnnnnnnnnnnnnnnnnnnnnnngcaaaacgatcttaacttgcgtcagcggaggtggttggagctacttaaggattatgatatcaccatttttgtaccgccataggaaggccaatatggtggccgatgctttgagtcgccgggcagagagttagggaaaattagcatatctaccagcaacagagaggcccatggcattggatgttctggccttagccaatcagtttatgagattggaaatttctgagctgagtcgagtattggcttatgtggtctcttggtattctctttatgatcgtatcagggagcgtcaatatgatgaccccaatctgcttgtccttaaggacacggtctagcatggtgatgctaaggaggtcactattgtagatgatggtgcattgaggatgcagggcaggctatgtgtgcccaatgtagatggtttgcgtgagttgattctctaggaggctcacagtttgtggtaatcaattcatccgggtgccgcgaagatgtattaggacttgaggcagcattactggtggaggagaatgaagaaggacatagtagagtatatggctcggtacctaaatttccagcaagtgaagtatgagcatcagcgaccaggtgggttaattcagaacttagagattccggaatggaaatgggtgcggatcactatggatttcgttgttggactcccacggacttagcggaggtttgatgctgtttgggtgattgtggataggtcgaccaagtcagctcattttattaacttgacgaaacgcccgtagaactttgtaaaaacgatcataaaagagtcccaagatgattaccttggcaaaccaagtataaatcctgaagaaccagcaagaacaacaattttctatcttccaaaaatagctccaaacacagctaatagaaggggaaaacgattgcaaagcgtagagattgcgcttctaggcacgggggcaaactttaacgatagaaatcgttaaaaatgcaccttaatcactcaagaacaccatgaaaccctctcttaagctttctcactgttttgggacgaagatgaaatgttttggggtcttaaaagtcggattttccgacttataccacttgtttgacctgacccggttcgcgacccaatttcagcccggacagtccgcggtaaaaacagtcataacgtttaactccaatgtcggtttgatgtgagatttctttgtttgcaaactagacttgtagaccttcgatttggtaggttgtgggtcccataaatctgtatatattgggagaaatgatctgatatatttgacccaaagtttagaaaacttattagagaaatttacgataacttttgccgacctttatttcgcaacttgcttgactcnnnnnnnnnnnnnnnnnnnnnnnnnnnnnnnnnnnnnnnnnnnnnnnnnnnnnnnnnnnnnnnnnnnnnnnnnnnnnnnnnnnnnnnnnnnnnnnnnnnnnnnnnnnnnnnnnnnnnnnnnnnnnnnnnnnnnnnnnnnnnnnnnnnnnnnnnnnnnnnnnnnnnnnnnnnnnnnnnnnnnnnnnnnnnnnnnnnnnnnnnnnnnnnnnnnnnnnnnnnnnnnnnnnnnnnnnnnnnnnnnnnnnnnnnnnnnnnnnnnnnnnnnnnnnnnnnnnnnnnnnnnnnnnnnnnnnnnnnnnnnnnnnnnnnnnnnnnnnnnnnnnnnnnnnnnnnnnnnnnnnnnnnnnnnnnnnnnnnnnnnnnnnnnnnnnnnnnnnnnnnnnnnnnnnnnnnnnnnnnnnnnnnnnnnnnnnnnnnnnnnnnnnnnnnnnnnnnnnnnnnnnnnnnnnnnnnnnnnnnnnnnnnnnnnnnnnnnnnnnnnnnnnnnnnnnnnnnnnnnnnnnnnnnnnnnnnnnnnnnnnnnnnnnnnnnnnnnnnnnnnnnnnnnnnnnnnnnnnnnnnnnnnnnnnnnnnnnnnnnnnnnnnnnnnnnnnnnnnnnnnnnnnnnnnnnnnnnnnnnnnnnnnnnnnnnnnnnnnnnnnnnnnnnnnnnnnnnnnnnnnnnnnnnnnnnnnnnnnnnnnnnnnnnnnnnnntcgaatgcgtggggtgctaccctgtgatgactacttattccttcgagcagctagctcgagtttatatccgcgagattatcaagcttcatggcatgccagtatctatcatctctgaccggggtacgcagttcacatcacggttccggagggctgtacagtgtgagttgggtactcgagtggagttgagcacaacatttcaccctcagacggatggacagtctgagcgcactatttagattcttgaggatatgctttatgcgtgtgtgatgaagtttgaaagttcttgggatcagttcttgccccttgcggagtttgcctacaacaacagttatcagtccagcatttagatggtaccgtatgaggctctgtatggtaggcggtgtcggtccctagtgggttggttcgagctgggcgaggctaggttattgggcacaaagttggttcaggatgctttggagaaggttaaggtgattcaggatagacttcgcacagcctagtccagatataagagttatgcagatcggaaggttcacgatgtggtattcatggttggagagcgagtcttgctccgggtttcgcctatgaagggcgttatgaggtttggaaagaaaggcaagctgagctcaaggtttattggtccctttgaggtgttacggagagttggggaggttgcttatgagcttgccttgcctcccagcttagcaagagttcatccggcatttcatttttcgatgctacaaaggtatcatggcaatccgtctcatgtgttggatttcagctcagtccagttggacaaggatctatcttatgttaaggagccagtggctatttttgacaggcaggttcgaaagaagaggtcaaagaacattgcatcagtaaaggtttagtggcggggttagctggtcgaggaggcgtcttgggagccgagcaggatatgtgcagccgttatcctcatcttttcaccacttcaggtatgtatctatgcttgtttgaggacaaatgattgttttaagagggggaggatgtaacgacccgtccggtcattttgagagtaatagccccgatcccctattaactactttccccatatctattttctgctattatgacttgcagggaggtttcgttttggttgttggagttttttgggacacttagtccctaaatgggagcttaagtcttagaatttggaccgtattcagaacaatgtgaagatggccccggaatggaattccgtcaattttgttagcttcgttgggtgagtttgggattaggggcgtgtccggattgtattttggaggtccgtagctcaattagccttgaaatagtgaaagtcgatatttttgagttttggaccagtagtagaatttttgatatcggggtcggattctgattccaaaagttggagtaggtccgtaatgttgattttgacttgtgtgtaaaatttggggtcaattggatgtggtttggttggtttcggcatcggtggtcgaatttgaaagtttcaagttctttaagtttgaatcggaggatgattcatgattttagcgttgtttgatgtgatttgagggctcgactaagttcgtatggtgttttaggattggttggtatgtttggttgaggtcttggggcctcgggtgagtttcagggtgagttttgagcgagtacgggcttttcggcactctaatgttgttctaggggtctttggaagtgcggatcgcacattttgggagtcttgaggcataagggaagtgcggacctcaggggaattgtgcgaaccgtacaatttcgtgtgcagccgcacttcaggctgcagaggagtgtacagccgcactcaggaactctcaggtttgctaatccgacttcgaaagcttatatcttttgatctacgacgaatttggagatgattcaaaaacaaaagttgtagccctttgtgtctagtttccagaaagataaataaaccatcatttggacattagcagataaagttatggacaaaatagtaaagcctagcagtgcaatcaccaaaagagtctgacggcacaatatttgtgcgaccataggagctgggatatgcggccgcacttggaattgtgcggaccgcacatggtgagttcatagaatgtactatataaccgaggcttaggttattatttcatatttcgaccttgggagctcggtttgagatgattgttcatggatttttcaagaaattcatcggggtaagtgattctaactcggatttggttaatatacatgaatatatcactgattttgtcatttaattagtactttgatatggaaattcgggaaagaattgtagaaacttcataaaccacaaattgaggatttggaggccgagttgtgattggaaatagctaattttggtatggttggactcgtgagtaaatgggtgttcatattttgtgacttttacccgatttcgagacgtgggcccggggagggtttttgggtgtttttctaatttcttgctttagctttgatttcattacctatattagtttcttgtagctatatttacgctatgtatttgatttggctagatttgggctagtcagagctggatattcgtgggaaaggcattgtgactgattgattgagcttggttcgaggtaagtggcttgcctaaccttgtgtgggggaactcctcttaggatttagtactgcttttgatatatgagcgccgtgtacgtgaggtgacgagtgcgtagacggactattgtcgcaaaactccattttcattaagtaaaatacctgtcttcctttaacagagctacactagcatatgaatttatcctgtttagactagaacatcatgtctacgtgtcttaattgcttttgtaaactctgtgcagcatgcttagagaatttcctgcttcttccttgactggtacttaatctaaatcgtaagatttcatgatgtagttgtatttctattgtttgcgctgcatatttcctttgggactacgaaacattattcaggtagatctcccatgctctgcataattactttgggactacagaacggtattccggtagatcccccctatttttgcacatttacgtatgggactatgggaaggtatcctgggagatcccctgttgttatttctgtgtactgagctgttgacttgctataatttcattcttgttaaatttcagtacttatttttattgcaatatttcattctgtcttagtttattatatatataccagtaggtccctgacctgatctcgtcactactcgaccgaggttaggcttggaaattacggggtacctttgtggtgtactcatgcccttccctgcacatgtttttcgtgtgcaaatccaggtaccactaatcatccgcattatcagtgaggcaagacagctgttgagacttcaaggtatatctaccgcgtccgcagacctaggagtccctatctacacttccccatgtcaaacacttcttgtatttctttttgttagattctggaatatagaaacactattctctttctgtagcttgtaacttatcgatattcctggttttgggagagttatatatatttcaagagtgaccgtggtatatgtcgagcggaatcttaatttcttatttagaatctacctgtaaattgctagtttaatgttttcgtttcatttccgcgaaggtgttaggcttacctagtcgtagagactagattctgtcatgacggtttaaggagggagaacttaggtcgtgatagcagggtacgatatggtagagggtttgtgggtcagccagttcagtttgcacttcaggcttcacacggtgtttcaggcacttatgggtctcaaagtacccgtaccgcacattttccacagccacgtcaacagagaggttgatttgagtgtggagatacaaaccacatggtgagagattgtcccatactccggacagatatggcacaacggggtattcatgcgagtagaggatgctcaagagggggaggcccggcccgttgatgtgtttcatacaataggtctgaggtcgctgtgccagacgatgtcatatagatatggttttgatttattatagagggacctcattcgtattgtgtttcagttctgattatcgaggtgagacctcctatcatgctccatataggacgagtttgtgaattgtacaccacccgcgtatttatccatgttgggagatttgatggtgttagcccgtgtctatcattttttctttgtacgttattgaggactaagagcccaaaagtgtctttttattactcactacagtgaattttgatgtaatttcaggataattgattgcaattttaggactttttatgccctgtcggtatgaggcttcattatgtgttgtgaaattgtttcacaaaatttatttaaagagaagaaggaaaagaaatggcaaatttcagttggcacaatgtgcaaagtacttgtgattcagagttgagggcgagatcctcgcatttttatatgatgtgaaatatttaaaccgggctacaacccgcggtggaagttatataaggacgaggtccttgtgatgaagatttatgtgtttaaggcctcccttgtgaaattaaatttttactatagtactaatagggagtcatgcatgttaggcttatttgataattcttttatgtgttttatgtgcatatttagccatttcgtgctgtaattattgagttttagcctatacggtgattgccctggtgatgttaaatgcaactcattaatttggataaataattaagaggtcttcatgcctcgcgtgttactgttagtgctgcaaaaatttgaaatgagatttttggttaatatgatattaattgaggatgctggaattaattataaacagctataacgaccagagatgtggttatgggagtacgtatgatgtgtgtatgggcatgaaatttgctacaatcggttgagactaacacaatgtgttaatatgaaaaatcaggcatttgaaattgattggagagtaaggaattggctttaaagcttataagtatggataaaagaaataatctctactgagacggtgttgttggaatcgtgttaaatttatggtgatgtagaatcatccgtgagtatgtgtgaaataatgcacttaataatttaaagtcctcaaaaagattcttggcacgttcgaggacgaacgtatgtttaagagggggagaatgtaacaacccaacttatcattttaagaattaattccctgttcaacggcttaagatatcgagcagcttcgtaatatgtattatgacctgcatgtatggtcgagtttggttttgggaatattttcgaatttaattaaaagaacaatcctcattttgtagcttaaaatgaaaaggttgaccagagtttggcttttgagcaaatgactctggaatggaattttgatgatgtcagtagtttcgtatggtgatttcagacttatgcatgtgtccgtatttggatttggaagtccataggataatttgacgcattttggcgaaagttggaaaatggaaaatttttagaaagtttgaccgggagttgactttattgatatcgaggtcgaaattcgattatggaaattggaacagatccgttatgtcatttgtgacttgtgtgcaaaatttgaagtcattccggattgatttgatatgcttcggcacaaattattgaatttgaaaatttgataactcataattcgattagaggtgcgattcattgttttggcattgtttgatgtgatttgaaagctcgactaagttttatcatgttttgggacttgttggtatgatttgacagggtcccgaggggcttgggtgtatttttggatcattggttgagagactactaaagttaagaaatttgggagtttgaccatggtcaatatcgggttaagacgacctctttacagtgttttgagtgcgtgagcaagtccgtagcatgttttatgattgaaattcatatatggtttgtgtccttgaggttccagatgagcttcaaagtggtttcagatcatttcggagacgttttaatttgctggtttctggtgagtgtcacgacccaaaacccattaaaggtcgtgatggcacctaacacagttgtcaggcaagccaaccttgacgaattaatttaattactcattttagtatttgagaatcgaatttttgttaattaaatagtaaagatagaattcatatagtaagtgataaatattttagaacataaattactaaacccataaccactccaaaaatctggtgtcacaagtgcatgagcattaactagggagtaagataaaatacagtatctgtccggaatataaattagacaagaaaatataaataactctgaaggagactctgctggttgcggatcctaatatagaatgcagctcacctaagtccctgcatttagccacacctctgcgcctacaaggccgctagacatatctgtacctgcacaaaaatgtgcagcaagtgtagcctgagtacgtaaataacgtgtactcagtaagtatcaagcctaacctcgaagaagtagtgacgagaggtcgactttggcactcactaagggtcaataatattcaaatagaaatatttaaatcaacatgatttagagaattaacaataattttctttaaccaacagaaataattaaattccttcaaatagacaattccaaatttatttaacttcacaagctgcaattaaaatattaaggtatcgtgtaattattattattagccatgatttctgccgaggtcgtacgacccgatccagagtgtcgtgtacattgtctagggacatgcggcgcgatccatagatgcatctatactgccgaggtattcggcccgctccacaagaaaggaggacattttcttatgtacctccagaatgaggatatatatattataagattaatagaagacgatgtttaatttgttttaacaattaaataatttatacaaaaattcaagtatatgagattccaatcttttactatcttccctagcaattcacaatatagttcaaatatattgattaaataaagaatacaataaatacgcgtaattcatgatttgagtcctaaacaacccggactttagcataaatagtagctacgcactaactctcgtcaaagcagctccgacaattagcaacaattattaatttaaatcacctaaggggtaaatttccccttacaaggttagacaagagacttacctcgacttgctccaatttattctactattaggcattttcctcgattaaccaactcttaatggctcgaatctagccaaaataattcgatacagtcaccaaaaattatacgaatcaatttcataagaaaatactacatttttcaataaaaatccgaaattaactcaaaaatcgcctgtggggaccatgtctcagaatccggcgaaagttacgaaatatgaacgcccattcaaccatgagtctacccataccaaaacaactaaatttcgataacaattcggccctcaaatcctcaaatttatccaagagggttttcaaacctttccaacttaattcaccaattaaatgataaaaacaatgatcgattcatgtaatttaaccaatattgagttaagattacttaccccgttgttttctctgaatgtctcccaaatatcgcctcaatccgagctccaaataggtttaaatggaaaatgggacgaagtcccattttcagaacttaaactctctgcctagtgatttcttctacgcgatcgcgaacattctcacgcgaccgcatagcacaaatttttattgcttaaaaataacactatgccatcacggataatcgcacgcgatcgtgaaacactaactctgcaaacctagattccgaccccgttatcaaatggtgcactcctggtcaaactttttaaaaacctttaaatttctaactttcgccaaataacctcgaaattacctacggacctccaaattaacatctggacgctctactaagacaagaatcaccatacggaggtattcccagactcggaatcccaaatggacatcgaaaacattgaaatgcacttcaacccaaatttatgaaattcttccaaaatgccaactttccacaataggcgttgaaacgctcccgggtcatccaaaacccgatccgatcataaacccaagtccaaattcatcatacgaacctattggaaccgtcaaatcccaattccgaggtcgtttactaaaaatattgaccaaagtcaaactcgcccttttaaagccaactaagttactaagtgctccgatttcaacccaaacactttcaaattctgaaccaatcatccccgcatgtcataaattagtaaaagcacatacagggagtcgtatttaggggaacggggttctaacagccaaaacgaccggttgggtcgttacattctctcccacttaaatatacgttcgtcctcgaacatgctaagaactactccaagtttgctaaaattattgtttaagaccttgagcacctatctgtgctaccacaactaagctgagcacattagcccgagcaaatctgaagattggcccctttgtttaggggaataagccttagatccaaattccaacattcgaaattttctattaggcctgcatccaacatatgtacaccgtttcaatcaccacacgatgtaccattacatgattgtatactctcactgaattcacatcatgcacaacattattcacatgaccataataacatcctctgacaatgatagacaaaattccacgaattcgatgcccataacacacttcatgacacatataagtcatgttccaatcttgcaatgctgccacgagggaaaagatgtgttgaaattcataaccaattatatagtcaacaaatcatatagtccctcctcctgacaggaaccattacctcattatgaaccaaataacgatatttgctctttaatatgcctcgtataaatctgatcgcactgatcccaggtccaaaaatcttgcctcacccagtacaagtcattccggtaataagccaccacaatcactaccaaaagtctcatatgatgccaccatctgccaaataaccacaaaatcgaatgtgatacataaggaataacgaactttggaaagaactacttaacccaagtagcaatttaaacaaccgaaaaggtgttatgaaccttcctcagaacatgagaaataagacatgcaagaatagatatggggaactgtactcaacatcatattgttacggcgtgcaacccgatccaaataacatacccatagcggcgggccacccaatccaccacacgtgacaataaatagggaagtacccattaagccaaaattcttatacctacgaaatacctgaatgtcaaccacaagcacgccaagtgcacaataccatcagatagtgccataccctacaaaactcaagcacgactaaagagtattaaatgacctgcaacttgagagccatcctgcccatataacatcgcaaactatacgggatctcaatacgagtgcgaatcaaaccgcctcacaacccacatagcacaatagacaccacatggaaaggccaacaacagaaataacatccaaggcccgaagacctcttcgaaaacaatgttatgcttaaatgaacacatccagtctaatattgagcccacattcatatttagatccatctacggacctcaagccgattctgatcgtaccgcactggctaataacctttcaaggatccacaataacctccatgacacaaaagaacagccgtcaaattcgaaacaacttccacagtccacaaccaaatgaaccgagcgcccttcagacataaattctcaaattagcgatagtaccgcaatctccatacttagttctaaatctttaaatcaaacaaatacaatattcccgtggaattcactcccacgaccttccgcatcaggtagcaaagtctgcacatccagaccaccagtcatacagtgttgtaaagcgaatcgaaagtccgcaaatcagtacacaaagcctcttacatatgacatcgatctcagtgatgctaaagacaataccagcttaccctaaacatctgaatccttccctgctagttcgagctcatgacatccttgtcaacaccattctgcaaccttgatcctcaactttcaaatttaatgccgctcaccgtacctatctcaccaacacgcgaaaacacaagaatttaatcataactcatgaaccactaataggatacacacttcatcatatatcaaccttttacttaactcattccaggagaaccattgcaacacgcgactgaatttccataaccgcagaaaataaaatcctcaaatagtggtctaaactaccataactcttctgggacccatctacacaaaacaaaccataatactcgaatgcctccaagtaaattcaattgcggcggccgccaagactcgcatgtaccgccacaaatcatgtgtataacttaacacgctgaaggaattgattattgccactatcattcaaattcaacaattactaaccgatctgacttcttctaatttactctggacttgccttaggagtaataatagctccattcaaattatatcaaactcaatccgcactcgctccgagtgactccatttcacgatcccacattggctcaaaacccacgtaccatctcataccctctttgtgcgcacgtttacatcctcaactggtacacccattgtgataattcctccatgaatccggagtcattgtcttccattcctccaatgttacatcgtagcccaaagataacgtagaacactccaagcctctttcataatctattgcaaaagctcgatacttaaccatactaaggactcaaaatccttaggcaccgcactaaaaattttgaatccacaaagaccgttgttgagagtcactcaccctaacttggtttcgactataatcaactccaaggcccttctagcacatgaacaccctctcaaagaagtacccggctgaagcactttccttgtatatcacctccacacgaagcataaaccctgagtcttctcaaaactaaacatgaaccgattaagcccaagtatagcacacattcctccaatccttcactcgaactaccactgacgtgttctttctttactcataataactcaccaatatgcagataatcagaaacctcaaaagtagataaccatgcaatccaatcgtagacaatgaggctctcccacttagcttgcagctaccattgcataaccctggaacctaccaagattccttcttcttcactgacatgaccttgagcaatcgacccgcccaattcctcgaaatcttcctgttaaccattttatgagcactcctaattactagccacattcataggttcgaccttttattggatagccagtcgaattctttgtggaagattcgtcaacaccacgcagccgttaaccttccaatgacgttgcgctaagtacaattaccgcgaaaccaataaaccatcctgagccagtgctcgttcaccaactgtacaagtctgttcacttatcatgggcatcaactaaaggtgcgacaatacattccaatccaaagccatgttgtatccttttgcatatcaagcaacctctttctgtcgcatccaatctcccgccgtataatagccaatattccaaattaagtccgttgacccagtcactgtccaccataaatcccaaataactctaaactttcctcaaggcatatagtcattctaccacagaagtcatatgctactcttccactttcccactttggtcaaactcactcctttaagcaactactcaactcatgtttctcacacttggccttctagaagtttaaccaccgcgaggcaccttccacatgtccttcctcatccttcgctacccagttgttgccttaaatcaatatctatttccgtagcacttgaaccgatagatcgccatcaactttaaacctttacgtggatcatctttctcgagccatcaacattaggataaccgatttgattctgagccacagcacactgcgacccctaacaaccgctttcccaacaccattcacaatattctgcaccaaaggcgaattgaagaaggccataacaccggcgaacttaacacattccatcaaggatgacattaccacatcatagatgaaaattccaccacgctcgaaaataccaagtcttgttaccctatcgacccaaacctgagcattcgtagtctgattgactttcctccaccggaaataaaatactgaatctctgaatcatgaactgagtaaaacctcctttcaagtcattcacttccccgacacatagacaagcatcccaccattacacaaacactgtgcaatagcaactcacaaatcgtcataataatcgatgccaaatctcaaaaccgttaggtagtactgatactgatctgaaatgataggacgaccttccgcaaggtgacgataatagaccaatcaaatacacagggagaaacatcctgcaccacatctgtagtaccattacaattcctcaatttccctattataacaagcgctccacatcgcataagattgaataggaaagagacaaaggtataagctttaaaggaatcaaatcgcacaatgaggactcaagacaaggaagtgctcctaacagccctgtagcctctcgaggataagtacagatgtcttcgtaccgatccgcaagactatactagacttgctcatgactcgtgagacctacgtgaacctagtgctctgataccatgttgtaacgacgcaaaacccattaaaggtcgtgatggcacctaacaccgttgtcaggcaagccaaccttgactaattaatttaattactcattttagtatttgtgaatcgaaatttcttcaattaaatagtaaagattgaatccatatagtaagtgataaatattttagcaactaaattactaaacaacccataaccactcccaaaacctggtgtcacaagtgcatgagcattaattacggagtaagataaaatacagcatctgtctggaatacaaattagacaggaaaatataaataactctgaaggagactctgctggctacggatcctgatgtaaaatgcaactcacctaagtccccgcatttaaccacacctctaaggccgctagacatatctgtacctgcacaaaaacgtgcagcaagtgtagcctgagtacgtaaataacgtgtacccagtaagtatcaagcctaacctcgaagaagtagtgatgaaaggccgactttggcactcactaagggtcaataatattcaaatagaaatatttaaatcaacatgatttatagaattaacaataattttctttaactagcagaaataattaaattccttcaaatagacaattcccaatttatttaacttcacaagctgtaattaaattatcaaggaatcgtgtaattattattattagccacgatttctaccgaggtcgtacgacccgatccagagtgtcgtgtacatttgccgagggacgtgcgtcgcgatccatagatgcatctatattacttaggcgttcggcccgctccacaatgaaggaggacattttcttatgcacctctggaatgaggatatatatattataagattaatacaagacgctgtttaatttgttttaacaattaaataatttataaacaaattcaagtatatgagattccaatcttttactatcttccctagcacttcacaatatagttcaaatacattaattaaataaagaatacaattaatacgcgtaattcatgatttgagtcctaaactacccggactttagcataaatagtagctacgcactgactctcatcacctcgtgcgtacgtagcccccacaattagcaacaattattaatttaaatcacttatggggtaaaatcccccttacaaggttagacaatagacttaccttgacttgctcaaatttaatccactaataggccttttcctcgattatccaactctgaatggctcgaatctagccaaaataattcgatacaatcaccaaaaaattataggaatcaatttcataagaaaatactacatttttcaataaagatccgaaattaactcaaaaattatccgtggggcccacgtctcggaatccagcaaaaattatgaaatatgaatgcccattcaaacacgagtctacccataccaaaattactaaattccgataataattcgcccctcaaatcctcaaatttatccaagagggttttcaaacttttccaacttaattaaccaattaaataataaaaacagtgatggattcgactaatttaaccaatattgagttaagaacacttaccccgttgttttctccgaaaatctcccaaaggtcacttcaattcgagctccaaatcggtaaaaatggaaaacgggatgaagtcccattttgagaacttaaactctctgcccagtgatttcttctacgcaatcgcgtagcacaaatgtttattgcacaaaaataaccctacgctatcgcgaaccttctcacacgatcgcgaagcattaagtgcgtggcacagctcctccctctgtgcctctccgagaacgcggccttagccacgcgttcgcatagcacaactcgcccaacctacgcgatcgcggatgatcccacgcgaacgcatagaacaaatttccagcttcccaattaagcctacgcgatcgcgaatcttctcacgtgatcgcgtagaaggaaaccacacaccaaattttagcaaactccaaatccaaaaattgatccgttagccgtttgaaactcacccgagttcatcgggacctcaaccaaatacaccaacaagtcctaaaatatcatacgaacgtagtcgaaacctcaaatcacatcaaacaacactagaaccacgaatcatactccaattcaagcttaatgaaacttaaaatttccaacttctacatttgatgccgaaacctatcaaatcaagtccgattgacctcaaattttgcacacaagtcataaatgacataacagagctatgaaannnnnnnnnnnnnnnnnnnnnnnnnnnnnnnnnnnnnnnnnnnnnnnnnnnnnnnnnnnnnnnnnnnnnnnnnnnnnnnnnnnnnnnnnnnnnnnnnnnnnnnnnnnnnnnnnnnnnnnnnnnnnnnnnnnnnnnnnnnnnnnnnnnnnnnnnnnnnnnnnnnnnnnnnnnnnnnnnnnnnnnnnnnnnnnnnnnnnnnnnnnnnnnnnnnnnnnnnnnnnnnnnnnnnnnnnnnnnnnnnnnnnnnnnnnnnnnnnnnnnnnnnnnnnnnnnnnnnnnnnnnnnnnnnnnnnnnnnnnnnnnnnnnnnnnnnnnnnnnnnnnnnnnnnnnnnnnnnnnnnnnnnnnnnnnnnnnnnnnnnnnnnnnnnnnnnnnnnnnnnnnnnnnnnnnnnnnnnnnnnnnnnnnnnnnnnnnnnnnnnnnnnnnnnnnnnnnnnnnnnnnnnnnnnnnnnnnnnnnnnnnnnnnnnnnnnnnnnnnnnnnnnnnnnnnnnnnnnnnnnnnnnnnnnnnnnnnnnnnnnnnnnnnnnnnnnnnnnnnnnnnnnnnnnnnnnnnnnnnnnnnnnnnnnnnnnnnnnnnnnnnnnnnnnnnnnnnnnnnnnnnnnnnnnnnnnnnnnnnnnnnnnnnnnnnnnnnnnnnnnnnnnnnnnnnnnnnnnnnnnnnnnnnnnnnnnnnnnnnnnnnnnnnnnnnnnnnnnnnnnnnnnnnnnnnnnnnnnnnnnnnnnnnnnnnnnnnnnnnnnnnnnnnnnnnnnnnnnnnnnnnnnnnnnnnnnnnnnnnnnnnnnnnnnnnnnnnnnnnnnnnnnnnnnnnnnnnnnnnnnnnnnnnnnnnnnnnnnnnnnnnnnnnnnnnnnnnnnnnnnnnnnnnnnnnnnnnnnnaaactagatttcaaccctgatatcaaatgttgcactccttgtcaaaccttttaaaaacctttaaatttctaactttcgccaaatgaccccgaaattacctacggacctccaaattaacatccggacgcgctactaagaccagaatcaccatatggagctattcccagactcagaatcccaaacggacatcggtaacattgaaatgcacttaaacccaaatttatgaaattcttccaaaattccaactttccacaataggcatcgaaacgctcccgggtcatccaaaacccgatacgatcatacacccaagttcaaattcatcatacgaacctattgaaaccgtcaaatcccgattctgaggccgtttactaaaaatgttggccaaggtctaactcgctctttttaaagccaactaaggacctaagtgctctgatttcaacccaaacacttctaaatcccgaaccaattatccccacaagtcataaattagtaaaagcacatacagggagtcttatttaggggaacgggtttctaatagtcagaacgaccggttgggtcgttacagtgagatattgttcattcgcaattgtgaaaacaccgttcattcgcaattgtgattcatttattgaaattacgtaaacactgttcatttgcaatatccgaaagtgattatatttcatgaatctattgttatattcatcgtttaattagagttttaatggaggaaattgggatttttgtaaaacttttcaaaaatgaaaatttaagatttggaggacgatttgttattggaattcgataaaattggtatggttgaacccgtatcggaatgggtgttcgaatttcataaacattatgtcgggttctgagaggcgggcccgnnnnnnnnnnnnnnnnnnnnnnnnnnnnnnnnnnnnnnnnnnnnnnnnnnnnnnnnnnnnnncattgacttttggttgacattttagaataaaattttaagtcgacgttttattaaccaaaattatttccgattaattttaatgaagttatacaattaatttggatagatnnnnnnnnnnnnnnnnnnnnnnnnnnnnnnnnnnnnnnnnnnnnnnnnnnnnnnnnnnnnnnnnnnnnnnnnnnnnnnnnnnnnnnnnnnnnnnnnnnnnnnnnnnnnnnnnnnnnnnnnnnnnnnnnnnnnttgagttgttcggaggtcaattcaagcaagaaggtgattttggaatatcagcataacttcaaaaaggtaagtatcttgcctaaccttgtgcaacgacccagacagtcgtttagagagtaatagcccagatcccctatttactgcttctcccatatcaatttctactattgtgacttgcgtgagggttccttttagtttttagagtgttttgggacacttagtccctaaaacgagagcttaagtctttggattttgaccgtggttgggaactatatgaagacaacttcgaaatagagttccgtgctccgttaggtgattttggacttaggggcgtgtccggattgtattttggaggttcgtagcttatttagccttgaattggcaaaaatcaaatttttagaattttggaccggtagtgaaatttttgatatcgggatcggaatccaattccggaagttggagtaggtctgaaatgttgaatatgacttgtgtgcaaaatttagggtaaattggatgtggattgatagattacggcatcggttgtggaaatttgaagtttcaagttctttaagtttgaatcggaggatgatttataattttagcattgtttgatgtggtttgagggctcgactaagctcgtatggtgttttaggattggttggtatgtttggtcgaggtcccgggggcctcgagtgagtttcgggtgcttaacagattgagtttgggacttatgcaattgttagagctgttgcacctggtgtaattgcacctgcgcattttgggccacaggtttggcactgcagaagccgccatagagccgtagaagcagttttcaccctgtctagctgggaccgcaggtgcgaccatagatccgcaaaagcggacgtgtagaagcggaaaaaaagcgcagatgcgggctcgcagaagcgacccttgttcgcgaatgcggactcagtcccccttaagtgatttttgcacctgcgatgcaatttccgcaggtgcagtaccgcaggtgcagttgaaggctcgcgggtgcgagatgtctggacagaacacttaaatacaagtgttcgcgattttttctcattttcaaaaattttgagcttgggtttggcaatttcttgagagaatttacaggggtttcttgaggtaagtcccttatgcttatttttgatcgataatcttgcttccccatatattttcccacctagttagtgtgtatttaaggtggaaattgggaatttgaggctaggggtttggaagtttgatttttggatttggaggaccatttggtgtcggattttagtaaatttgatatggttagactcgtgagtgaacgggctttcgtattttatgacttttacccgattccaagacataggacccactggagagttttgagttaatttaggaattttcgttaaagtgttgatttccttaattagatgagcctatattgttgtactaatgatatgtaattgcttttggctagatttgcgtcatttggagccggatattcgtgggaaaggcattgtgaccgattgattgagcttggttcgaggtatgtggcttgcctaactttgtgtgggggtaatccccttaagatttggaactattgtgatttgtaagcgccgtgtacgtgaggtgacgagtacgtacacatgctagttgtggtaaaacccgattttcttcctgagcagcagcatgttatccttttattttgagttataccattttaatgagcattaatctattttcattcttaattgagtgattccaatatgtgtagctatcctttttagtctaatacaacatgtctacgtgtcttaattgtttatgtgaattctgtgcagcatgcttagtgaatttcctacttcttccttgactagtacttagtctaaatcgtaatatttcgtgatgtaattgtatttctattatttgcggtgcatatttactttgggactacggaacggtatttcgggagatccctctgtactgcatatttactttgggactacggaacggtattccgggagatccccctgtactgcatatttactttgggactacagaacgatatttcggaaaatcccccagtactgcatatttactttgggactacagaacggtattctgggagatccccgtgcacttcatatttactttgggactacggaacggtattccgggagatccccctgtactgcatatttactttgggactacagaacgatatttcggaaaatcccccagtactgcatatttactttgggactacagaacggtattctgggagatccccgtgcacttcatatttactttgggactacggaacggtattccgggagatccccctgtactgcatatttactttgggactacagaacgatatttcggaaaatcccccagtactgcatatttactttgggactacagaacggtattctgggagatccccgtgcacttcatatttactttgggactacggaacggtattccgggagatccccctgtactgcatatttactttgggactacagaacggtattctgggagatccccctgcactgcatatttactttgggactacggaacggtatttcgggagatccctctgtactgcatatttactttgggactacggaacggtattccgggagatccccctgtactgcatatttactttgggactacagaacgatatttcggaaaatcccccagtactgcatatttactttgggactacagaacggtattctgggagatccccctgcacttcatatttactttgggactacggaacggtattccgggagatccccctgtcttgcctatttactttgggactacggaacggaattctgagagatcctcctgcacacttacgttgggactacgagacggtatctcgggagatcccttgttgtgtttctatgtactgagttgttaccttatatgatttcattattgttaaatttcagcctttattttattatagtatttcactctatattattttattatatatttaccactagggccctgacctaaacgcgtcactactcgaccgaggttaggcttgacacttattgagtaccaattgtggtgtactcatgctactctctacacatgtttttcgtgtgtagatccaggtgcaccttatcagctgcactatcagtgagccgggacagctttggagacttcaaggtatatctgccgcatccacagacctcagagtccccttccactctttctaatgtccattatcttctgtatatttccttgttagactctaatgtatagagacactagatgtttccttatgtagtttgtgattcacgatgttccgatttttgggattactgtgtatttttgaatagttggtcaaacttatatttttatttcattattttgcaaaaatgttaggcttacctagttgtagagactaggtgccgtcacgacttcacatagagggaaatttgggttgtgacaagttggtatcagagcactacgttcataggttacgtgagtcacaagccggtttattagagtctcgtggatcggtatggagacgtatgtacttatctccgggaggctatggaactgttaggaaaatttcattactttgattccttgtcgtgcgataattgttgacttcaaagattctaaacttctgtattctattctctcacagatggtgaggatacgtacaaacagatccgatgaccaggcacctgcaccccctgctagagccgcgagaggctggggctgaggtaaaggccgatgacgtccatgtggtgcagccagagcacccgcacgagctgctacagaggagcccccagtagctctagttggagggcagacacctgaggtacctgtttctgcaccagccctccaggagactgtagcacagtttcagagcatgttcagcatcttacctcaggctagattgattccacttgctcctgccacatctcaggccgggggaggagcacagactcctatttctggtactctagagcagcgggttcaggtcgaccaggttctagagattgtaccaatgcagctgacagctccagctcagcccgaggttagggcagcaacttctgaggtggagcagctcaggcttgagaggtacaagaagtaccacccacctaccttcaacgtattggccatagatgatgctcagtgttttctagaagagtagtccggctgaggcagcttcacttacattgactcagttctcgggcatgtttttgagagagtatgtccctcagagcctcagggactcatggcgcgcgtagtttgagcagttgtgccagggtgctataactatgtcagagtatgcagtttacttcagtgatttggcccgacatgcaccggccttagttgccacagttcgagagagggttcgacggttctatcccaacatccggagtagtatggccagagaattggagatgtatatttcttatcagcaggttgtgagtattaccaggataattgagggcatatttgtccgggatagagaggagaaggaggccaagaggtctcgagaggttggttattattctggagctcgtgccccaacagatcgccatggtaggggttatgtgagccgacccgttcattcagctcttctagccgcgagcggtgttccagctcctcctagaccccaagagccttattatgcactaccagtatctagtgtgcctcatgcacgagatgttcctagtggccagtccattagacctggcccgagccagtcacagtagccacgccctcccagaacttgttttgagtgtgacgacactctccatgtggtgagggattgccccaggattatgaggggtgcacctccacagacttctcagccacaacgtgctccaccgggtcctcaggctatgattacagcacgagctgccaccccacctactcagccagctcgaggtggaggtcggggaggtagaggtcaccctagagggggaggccagtccagatataatgcatttcctgcttgtacagaggcaattgcttctaattctgtcattacaggtattcttccggtctgtcatagagatgcatcggtattatttgacccgggctctacatattcttatgtgtcctcttattttgccccgtatttgggcgtatcttgggattccttgagttcccctatttatgtgtctactcctgtgggagattctcttgttgtggaccatgtgtatcagtcgtgtttgattgctcttagtggttttgagaccagagctgatttattgttgctcagcatggtggactttgatattattttgggcatagactggttgttgctacattatgctattcttgattgtcacgctaagaccgtgacactggctatgccaagtttaccgtgattagcgtggagaggtagcttagagtatactcccatcagagttatttcttttcttaaagctcaacaaatggttgagaaggggggtgacgcgtatctagcttatgagagatgtcagtgttgatacccctacagttgagtcagtactagtagtgagggactttccagatatgtttccatctgatcttccaggcatgctgcccgatagagatattgattttggcattgatttgttgtcgggcactcagctcatctctattcctccatatcgcatggctcctcctgagttaaaggagttgaaggagcagttacaggaatttcttgataagggttattcggcctagtgtgtcaccttggggtgctcctgccttatttgtgaagaagaaggatggttctacgcggatgtgtattgattaccaccagttgaacaaagtcacagtgaagaacatgtatccattgcctcgtattgttgacttatttgatcagttacagggtgccaacgtgtttttcaagattgacttacattcaggatatcatcagttgaagattcgggagcttgatatcccgaagacggctttcaggaacagatatggtcattatgagtttcttgttatgtcttttgggctgaccaatgcccccacagcgtttatgcacttgatgcatagtatattccggccttatcttgactcattcatcattgtgttcattggcaacattctggtatacttctggagtcgggaagatcatgagcatcacctgaggactacgcttcaggccttaagagaaaagaagttatatgcaaaattttcaaagtgtgagttttggctagacatagtgacattcttgggtcatatagtatcgagtaaggggatccagatgcatccaaagaagattgaatcagtgcaaagttggcccagaccatcctctgctacagagatatagagttttcttggtttagcggggtattaccatcgctttgtagagggattctcatctattgcagcacctatgaccaagctgacccacaagggtgctccgttcaggtggacagaggaatgtgaggagagctttcataagctcaagacagctttgactacagccccagtattggtattacctacaggttcggggtcttatactgtannnnnnnnnnnnnnnnnnnnnnnnnnnnnnnnnnnnnnnnnnnnnnnnnnnnnnnnnnnnnnnnnnnnnnnnnnnnnnnnnnnnnnnnnnnnnnnnnnnnnnnnnnnnnnnnnnnnnnnnnnnnnnnnnnnnnnnnnnnnnnnnnnnnnnnnnnnnnnnnnnnnnnnnnnnnnnnnnnnnnnnnnnnnnnnnnnnnnnnnnnnnnnnnnnnnnnnnnnnnnnnnnnnnnnnnnnnnnnnnnnnnnnnnnnnnnnnnnnnnnnnnnnnnnnnnnnnnnnnnnnnnnnnnnnnnnnnnnnnnnnnnnnnnnnnnnnnnnnnnnnnnnnnnnnnnnnnnnnnnnnnnnnnnnnnnnnnnnnnnnnnnnnnnnnnnnnnnnnnnnnnnnnnnnnnnnnnnnnnnnnnnnnnnnnnnnnnnnnnnnnnnnnnnnnnnnnnnnnnnnnnnnnnnnnnnnnnnnnnnnnnnnnagcggattgttctcggagcggtgttgatgcaggacaatagggtgattgcctactcatccagataactgaaggtgcacgaaaatgactatcatgtccacggccatgagttagcagcaattgttcatgccttgaagatatggcgacattatttgtacggtgttgcttgtgagatttacaccgatcatcggagtttgcagcatctatttaagtagaaagatcttaacttacgtcagcggaggtggttggagctgcttaaggattatgatatcactattttgtaccaccctgggaaggccaatgtggtggccgatgctttgagtcgccgggcagagagtttggggagtttagcatatctaccaacagcagagaggccattggcgttggatgttcaggccttagccagccagtttgtgagattagatatttctgagccgagtcgagtattggcttgtgtggtctctcggtgtcacatctcttttcccccaaattagctcttattgggaggttgagttagaagaatttttccaattaaagtgacgttttgaaaagggattatttattattcagagtcgccacttggaattgagttttggtgttccaagtcacctttnnnnnnnnnnnnnnnnnnnnnnnnnnnnnnnnnnnnnnnnnnnnnnnnnnnnnnnnnnnnnnnnnnnnnnnnnnnnnnnnnnnnnnnnnnnnnnnnnnnnnnnnnnnnnnnnnnnnnnnnnnnnnnnnnnnnnnnnnnnnnnnnnnnnnnnnnnnnnnnnnnnnnnnnnnnnnnnnnnnnnnnnnnnnnnnnnnnnnnnnnnnnnnnnnnnnnnnnnnnnnnnnnnnnnnnnnnnnnnnnnnnnnnnnnnnnnnnnnnnnnnnnnnnnnnnnnnnnnnnnnnnnnnnnnnnnnnnnnnnnnnnnnnnnnnnnnnnnnnnnnnnnnnnnnnnnntttttttaattgtttggacccagatgcgatacgcacacaaggtatttctttgaagttagatattaaaccaaaggtacacgaatgtacacatggttaaaacataattatttttaaatttaaaagtatcaagacgcgaaaatgtacacatgatccttttattatttaagcatatcaatccaaggttcgggtatgaacacatggcctatatttaaagtgcggttaaagcttttataacgcatttatgagttatcttaatttttgaattaaatgtaaggccatgagttatggaatatgaagttgttggaagtcaagaaatattttaacttttggagtatgtacgtcattattcaatatgaaagaaatannnnnnnnnnnnnnnnnnnnnnnnnnnnnnnnnnnnnnnnnnnnnnnnnnnnnnnnnnnnnnnnnnnnnnnnnnnnnnnnnnnnnnnnnnnnnnnnnnnnagctagcttatgtttaatttatttaaggaagtctgcctagcagaatatttttggggccaaattctctttaccttccttttcagttttcaaaagttcagcagcccattgctcaattaaattatgcccaaaacccatgaccaatctgtataccttaactaatgatccactttaacttgcgggataaaacaatagcttacttgctatcatcagtttaggcctaatcgttattttatcactaactattattgataaataatgattgaataaaaatcggactcataacagataaaacatatacaaataaaataagatcaaatattaactaagaagaaatatactgagatggagttaaagcatgacatataggaacaaaagagctaagaacaaacatatagccaaaggaatattccattcaatcttagccttcaagtttacataaagcaccaaatactaatttattaacatatgatgaatcaaattaagaaaaaataaattttaacatcaacagnnnnnnnnnnnnnnnnnnnnnnnnnnnnnnnnnnnnnnnnnnnnnnnnnnnnnnnnnnnnnnnnnnnnnnnnnnnnnnaaaagataaaataaattcattcacataaataataaacaacgacacactaaagaaagaaagagttagcgagggacctttaatgtaataaacttcttcactgtgttaagaaataatctccaaatgttgggttacagagaacgaacggtaaccaagcttgaaagcaaataggattacaaaaccagagacccgaccggcaannnnnnnnnnnnnnnnnnnnnnnnnnnnnnnnnnnnnnnnnnnnnnnnnnnnnnnnnnnnnnnnnnnnnnnnnnnnnnnnnnnnacgtgggtggtcttatacagttgaaacgaagctatgctcttcctcgaatatggtgcgacgacgactattttttggggtggtttggtgctgcgttgcagctactttttggagctggattttgctgattttgagaggtgttcggatggttaaaggctggtgaagtttggtggtttgcatggtgttttatggactgttttaggatgagtttcgtggttctttcatggctgaaaaagggtgagaagctgctgttctttttaggaagaaggagcagctgcgtttttgttcttaaaggaagaaactgatgcacagcttttgggtcctatcgctctaggattttcttcttttttttgttttctaaaaatgttcccccctttttgttcttcttcctcgtcccttttataaagaataacaatggtagttatcaagtcttgtgccaaagagttaaaatgaggacgtgggattgaggttcaaaagggaattgagacgtgaggtgtgtgctggagtagattgacgtgaaggggaagggaaataggaagttagttatcattttttatcttttgtgagagtnnnnnnnnnnnnnnnnnnnnnnnnnnnnnnnnnnnnnnnnnnnnnnnnnnnnnnnnnnnnnnnnnnnnnnnnnnnnnnnnnnnnnnnnnttatagaggtgtatatgagagtcatggggtgaatggaatctcttttaagctttttcttctttctctttttatttttgtttccttttagaattaaaattcaattaaaatatttagacaaaaatattaattaactaactcttattaacaacaaaaaagatatatatacctcagcttattcaaattctaattaaaagaaaccatttatttttgtaaattttctttctctttacaaatagaaataaaatttttactatatatatatatatatatannnnnnnnnnnnnnnnnnnnnnnnnnnnnnnnnnnnnnnnnnnnnnnnnnnnnnnnnnnnnnnnnnnnnnnnnnnnnnnnnnnnnnnnnnnnnnnnnnnnnnnnnnnnnnnnnnnnnnnnnnnnnnnnnnnnnnnnnnnnnnnnnnnnnnnnnnnnnnnnnnnnnnnnnnnnnnnnnnnnnnnnnnnnnnnnnnnnnnnnnnnnnnnnnnnnnnnnnnnnnnnnnnnnnnnnnnnnnnnnnnnnnnnnnnnnnnnnnnnnnnnnnnnnnnnnnnnnnnnnnnnnnnnnnnnnnnnnnnnnnnnnnnnnnnnnnnnnnnnnnnnnnnnnnnnnnnnnnnnnnnnnnnnnnnnnnnnnnnnnnnnnnnnnnnnnnnnnnnnnnnnnnnnnnnnnnnnnnnnnnnnnnnnnnnnnnnnnnnnnnnnnnnnnnnnnnnnnnnnnnnnnnnnnnnnnnnnnnnnnnnnnnnnnnnnnnnnnnnnnnnnnnnnnnnnnnnnnnnnnnnnnnnnnnnnnnnnnnnnnnnnnnnnnnnnnnnnnnnnnnnnnnnnnnnnnnnnnnnnnnnnnnnnnnnnnnnnnnnnnnnnnnnnnnnnnnnnnnnnnnnnnnnnnnnnnnnnnnnnnnnnnnnngaatataggtgtggtgaaaaattagttgttaacactcggtcttctctttatgatcgtatcacggagcttcctcaaggaaacggtccagcacactgatgttaaggaggtcactattggagatgatggtgcattgaggatgcagggcacactctgtgtgcccaatgtagatggtttgcgtgagttgattctctaggaggctcacagtttgcggtactctattcatccgggtaccgcaaagaagtatcaggacttgaaacatcattacgggtggaggaggatgaagaatgacatagtagagtaagtggctcgatgtctgaattgccagcaggtaaaatataagcatcaacgatcaggtgtattgcttcagaagttagagattccggagtggacatgggagctgattagtatggatttcgttgttggactcccactgactcagcagaggtttgatgcagtatgggtgattgtggataggctgagcaagtagtctcatttcattcctgtgatgactacctattcttccgagcagctagctcgaatctacatccgtgagatcgtcaggcttcatggcgttccagtatctattatctctgaccggggtacgcagtttacatcacggttctggagagctgtacaacattagttggtcactcggattgagttgagcatagcatttcaccctcagacggtcgggcagtccgagcgcactattcagatattagaggatatgctccgtccgtatgatagattttggagatgcttgggaccagttcttgccatttgcggagtttgcttccaacaacacttatcagtccagcattcagatggcaccatatgaggctctgtatggtaagcggtgtcggtccccagtaggttggttcgagcccggcgaggccagattattgggtacagacttggtttaggatgccttggaaaaggtgaatgtgattcagtatagggcgttatgaggtttggaaagaagggcaagctgagcccaaggttcattggtccatttgaggtgttgcgtcaagttggggaggttgcttatgagcttgccttgcctcccagtctagcaggagttcattcggtattccatgtttctatgctccggaagtatcacgacgatccatctcttgtgttggattttagctcagtccagttggacaaagatctatcttatgttgaggagccagtggttattttagacagacaggtcagaaacctaagatcaaagaacatttcttccgtgaaggttcattggaggggacaaccggtcgagaaggcgacttgggagaccgagcatgttatgtgcagccgttaccctcaccttttcaccacttcaggtatgtctttatactcgttcgaggacgaatgattatttttagaggggaaggatgtaacgacccggctgatcgtttagagagtaatagccccgatcccctatttactgcttctctcatatctatttctgctattgtgactttccgggagtgttccttttagtttttagagtgttttgggacacttagtccctaaaacgagagcttaagtcttaggattttgaccgtggttgggaactatgtgaagacaactccggaatagagttatgtcggttctgttagctccattagatgattttggacttaggggcgtgtccggattatgttttggaggttcgtagcttatttagccttgaattggcaaaaatcgaatttttagagttttggaccggtagtgaaatttttgatatcgggattgaaatccaattccggaagttggactaggtccgaaatgttgaatatgacttgtgtgcaaaatttgggctaaattggacgtggattgatagatttcggcatcggttgtgaaaatttaaagtttcaagttctttaagtttgaatcggaggatgatttataattttagcattgtttgatgtggtttgagggctcgactaagctcgtatggnnnnnnnnnnnnnnnnnnnnnnnnnnnnnnnnnnnnnnnnnnnnnnnnnnnnnnnnnnnnnnnnnnnnnnnnnnnnnnnnnnnnnnnnnnnnnnnnnnnnnnnnnnnnnnnnnnnnnnnnnnnnnnnnnnnnnnnnnnnnnnnnnnnnnnnnnnnnnnnnnnnnnnnnnnnnnnnnnnnnnnnnnnnnnnnnnnnnnnnnnnnnnnnnnnnnnnnnnnnnnnnnnnnnnnnnnnnnnnnnnnnnnnnnnnnnnnnnnnnnnnnnnnnnnnnnnnnnnnnnnnnnnnnnnnnnnnnnnnnnnnnnnnnnnnnnnnnnnnnnnnnnnnnnnnnnnnnnnnnnnnnnnnnnnnnnnnnnnnnnnnnnnnnnnnnnnnnnnnnnnnnnnnnnnnnnnnnnnnnnnnnnnnnnnnnnnnnnnnnnnnnnnnnnnnnnnnnnnnnnnnnnnnnnnnnnnnnnnnnnnnnnnnnnnnnnnnnnnnnnnnnnnnnnnnnnnnnnnnnnnnnnnnnnnnnnnnnnnnnnnnnnnnnnnnnnnnnnnnnnnnnnnnnnnnnnnnnnnnnnnnnnnnnnnnnnnnnnnnnnnnnnnnnnnnnnnnnnnnnnnnnnnnnnnnnnnnnnnnnnnnnnnnnnnnnnnnnnnnnnnnnnnnnnnnnnnnnnnnnnnnnnnnnnnnnnnnnnnnnnnnnnnnnnnnnnnnnnnnnnnnnnnnnnnnnnnnnnnnnnnnnnnnnnnnnnnnnnnnnnnnnnnnnnnnnnnnnnnnnnnnnnnnnnnnnnnnnnnnnnnnnnnnnnnnnnnnnnnnnnnnnnnnnnnnnnnnnnnnnnnnnnnnnnnnnnnnnnnnnnnnnnnnnnnnnnnnnnnnnnnnnnnnnnnnnnnnnnnnnnnnnnnnnnnnnnnnnnnnnnnnnnnnnnnnnnnnnnnnnnnnnnnnnnnnnnnnnnnnnnnnnnnnnnnnnnnnnnnnnnnnnnnnnnnnnnnnnnnnnnnnnnnnnnnnnnnnnnnnnnnnnnnnnnnnnnnnnnnnnnnnnnnnnnnnnnnnnnnnnnnnnnnnnnnnnnnnnnnnnnnnnnnnnnnnnnnnnnnnnnnnnnnnnnnnnnnnnnnnnnnnnnnnnnnnnnnnnnnnnnnnnnnnnnnnnnnnnnnnnnnnnnnnnnnnnnnnnnnnnnnnnnnnnnnnnnnnnnnnnnnnnnnnnnnnnnnnnnnnnnnnnnnnnnnnnnnnnnnnnnnnnnnnnnnnnnnnnnnnnnnnnnnnnnnnnnnnnnnnnnnnnnnnnnnnnnnnnnnnnnnnnnnnnnnnnnnnnnnnnnnnnnnnnnnnnnnnnnnnnnnnnnnnnnnnnnnnnnnnnnnnnnnnnnnnnnnnnnnnnnnnnnnnnnnnnnnnnnnnnnnnnnnnnnnnnnnnnnnnnnnnnnnnnnnnnnnnnnnnnnnnnnnnnnnnnnnnnnnnnnnnnnnnnnnnnnnnnnnnnnnnnnnnnnnnnnnnnnnnnnnnnnnnnnnnnnnnnnnnnnnnnnnnnnnnnnnnnnnnnnnnnnnnnnnnnnnnnnnnnnnnnnnnnnnnnnnnnnnnnnnnnnnnnnnnnnnnnnnnnnnnnnnnnnnnnnnnnnnnnnnnnnnnnnnnnnnnnnnnnnnnnnnnnnnnnnnnnnnnnnnnnnnnnnnnnnnnnnnnnnnnnnnnnnnnnnnnnnnnnnnnnnnnnnnnnnnnnnnnnnnnnnnnnnnnnnnnnnnnnnnnnnnnnnnnnnnnnnnnnnnnnnnnnnnnnnnnnnnnnnnnnnnnnnnnnnnnnnnnnnnnnnnnnnnnnnnnnnnnnnnnnnnnnnnnnnnnnnnnnnnnnnnnnnnnnnnnnnnnnnnnnnnnnnnnnnnnnnnnnnnnnnnnnnnnnnnnnnnnnnnnnnnnnnnnnnnnnnnnnnnnnnnnnnnnnnnnnnnnnnnnnnnnnnnnnnnnnnnnnnnnnnnnnnnnnnnnnnnnnnnnnnnnnnnnnnnnnnnnnnnnnnnnnnnnnnnnnnnnnnnnnnnnnnnnnnnnnnnnnnnnnnnnnnnnnnnnnnnnnnnnnnnnnnnnnnnnnnnnnnnnnnnnnnnnnnnnnnnnnnnnnnnnnnnnnnnnnnnnnnnnnnnnnnnnnnnnnnnnnnnnnnnnnnnnnnnnnnnnnnnnnnnnnnnnnnnnnnnnnnnnnnnnnnnnnnnnnnnnnnnnnnnnnnnnnnnnnnnnnnnnnnnnnnnnnnnnnnnnnnnnnnnnnnnnnnnnnnnnnnnnnnnnnnnnnnnnnnnnnnnnnnnnnnnnnnnnnnnnnnnnnnnnnnnnnnnnnnnnnnnnnnnnnnnnnnnnnnnnnnnnnnnnnnnnnnnnnnnnnnnnnnnnnnnnnnnnnnnnnnnnnnnnnnnnnnnnnnnnnnnnnnnnnnnnnnnnnnnnnnnnnnnnnnnnnnnnnnnnnnnnnnnnnnnnnnnnnnnnnnnnnnnnnnnnnnnnnnnnnnnnnnnnnnnnnnnnnnnnnnnnnnnnnnnnnnnnnnnnnnnnnnnnnnnnnnnnnnnnnnnnnnnnnnnnnnnnnnnnnnnnnnnnnnnnnnnnnnnnnnnnnnnnnnnnnnnnnnnnnnnnnnnnnnnnnnnnnnnnnnnnnnnnnnacacgtacacggaagatttggaactattgtgatatgtgagcgtcgtgtacgtgaggtgacgagtacgtacacgggctagttgtggtaaaatccaattttcttactaagcagcaatatgttatccttttattttgagttataccattttaatgagtattaacctattttcattcttaattgagtgattccaatatgtgtagctttcctgtttagtctaatacaatatgtctacgtatcttaattgtttatgtgaattatgtgcagcatgcttagtgaatttcctgcttcttccttgactggtacttagtctaaatcataatatttcgtgatgtagttgtacttctattgtttgcggtacgtatttactttgggactatggaacggtattccgggagattcccctgtactgcatatttactttgggactatggaaaggtattccgggagatccccctgtactgcatatttactttgggactacggaacggtattctaggagatcccccaatactgcatatttactttgggactacggaatagtattctgggagatccccctgtacttcatatttactttgggactacggaacggtattccgggagatccctctgttttgcatatttactttgggactacggaacgatactccgcgagatccccctgcacatttacgttgggactacgagacggtatctcggaagatcccatgttgtgtttctgggtactgagctgttaccttctatgatttcattgttgttaaatttcagcctttattttattgcggtattttactttatattgttttattatatatttattagtagggccctgacctgacctcgtcactactcgacagaggttaggattggcacttactcggtaccgattgtggtgtactcatgctactttctgtacatattttccgtgtgcagatccaggtgcaccttatcagccgcactatcagtgagccaggacaactttggagacttcaaggtatatctgccacgtccgcagagctcggagtccccttccactctttctcatgtccattatcttctgtatttttccttgttagattctgatgtatagagacactagatttttccttctgtagtttgtgattcacgatgttccgggttttgggatttgttgtgtatttttgaatagtttcttaaacttatatttttatttcattattctgcaaaaatgttaggcttacctagttgtagagactaggtgccttcacgacgtcacacggagggaaaattgggtcgtgacagcttgagtgggggaattacccctagccatcgagtcatatgtgccatttgtgaaatgtaaaaaaaagtcgtgtacgagaggtgacgagtacgtactcgggcttatatgtgcaaatcttattggtttaaagtcttaagcattttatgtagtaaaatggataattgttggntgggggcctcgggtgagtttcaagtgtttaacggattgagtttgggacttatgcaattgttggagctgttgcacctggtgtaatcgcacatgcgctctttgggccgcaggtgcggcaccgcagaagcggccatggagccgaagaaatgattttgaccctgtccagttgggaccgcaggtgcggccaaagatccgcagaagcggaagagaagcacagatgcggtctcgcagaagcggcccttgttcgcagatgcggacttagtcccccttaagtgatacttgcacctgcgatggaattttcgcaggtgcggttgaaggctcgcaggtgcgagatatctggacagaacacttaaatgcatgtgttcgcgatttttgcttattttcaacattttgagctcgggtttggcgatttcttgagagcatttataggggtttcgtaagtaagtcccttgtgcttatttttgatcaataatcttgcttccccatgtattttcccacctagttagtgtgtatttaaggtgaaagttgggaatttaaggctaggggtttggaagtttgatgtttggatttggaggaccatttggtgtcggattttagtaaatttgatatggttagactcttgagtgaataggctttcgtattttggacttttacccgattccgagacataagccccacttgcgattattgagttaatttaggaatttttgttaaagtgttgatttcgttaattagatcagcctatattgttgtatttatgatatgtaattgcttttggctagatttgggccattcggagctggatattcgtgggaaaggcattgtgaccgattaattgagcttggtttgaggtaagtggcttgcctaactttgtgtgggggaaatccccttaagatttggaactattgtgatatgtgagcgtcgtgtacgtgaggtgacnnnnnnnnnnnnnnnnnnnnnnnnnnnnnnnnnnnnnnnnnnnnnnnnnnnnnnnnnnnnnnnnnnnnnnnnnnnnnnnnnnnnnnnnnnnnnnnnnnnnnnnnnnnnnnnnnnnnnnnnnnnnnnnnnnnnnnnnnnnnnnnnnnnnnnnnnnnnnnnnnnnnnnnnnnnnnnnnnnnnnnnnnnnnnnnnnnnnnnnnnnnnnnnnnnnnnnnnnnnnnnnnnnnnnnnnnnnnnnnnnnnnnnnnnnnnnnnnnnnnnnnnnnnnnnnnnnnnnnnnnnnnnnnnnnnnnnnnnnnnnnnnnnnnnnnnnnnnnnnnnnnnnnnnnnnnnnnnnnnnnnnnnnnnnnnnnnnnnnnnnnnnnnnnnnnnnnnnnnnnnnnnnnnnnnnnnnnnnnnnnnnnnnnnnnnnnnnnnnnnnnnnnnnnnnnnnnnnnnnnnnnnnnnnnnnnnnnnnnnnnnnnnnnnnnnnnnnnnnnnnnnnnnnnnnnnnnnnnnnnnnnnnnnnnnnnnnnnnnnnnnnnnnnnnnnnnnnnnnnnnnnnnnnnnnnnnnnnnnnnnnnnnnnnnnnnnnnnnnnnnnnnnnnnnnnnnnnnnnnnnnnnnnnnnnnnnnnnnnnnnnnnnnnnnnnnnnnnnnnnnnnnnnnnnnnnnnnnnnnnnnnnnnnnnnnnnnnnnnnnnnnnnnnnnnnnnnnnnnnnnnnnnnnnnnnnnnnnnnnnnnnnnnnnnnnnnnnnnnnnnnnnnnnnnnnnnnnnnnnnnnnnnnnnnnnnnnnnnnnnnnnnnnnnnnnnnnnnnnnnnnnnnnnnnnnnnnnnnnnnnnnnnnnnnnnnnnnnnnnnnnnnnnnnnnnnnnnnnnnnnnnnnnnnnnnnnnnnnnnnnnnnnnnnnnnnnnnnnnnnnnnnnnnnnnnnnnnnnnnnnnnnnnnnnnnnnnnnnnnnnnnnnnnnnnnnnnnnnnnnnnnnnnnnnnnnnnnnnnnnnnnnnnnnnnnnnnnnnnnnnnnnnnnnnnnnnnnnnnnnnnnnnnnnnnnnnnnnnnnnnnnnnnnnnnnnnnnnnnnnnnnnnnnnnnnnnnnnnnnnnnnnnnnnnnnnnnnnnnnnnnnnnnnnnnnnnnnnnnnnnnnnnnnnnnnnnnnnnnnnnnnnnnnnnnnnnnnnnnnnnnnnnnnnnnnnnnnnnnnnnnnnnnnnnnnnnnnnnnnnnnnnnnnnnnnnnnnnnnnnnnnnnnnnnnnnnnnnnnnnnnnnnnnnnnnnnnnnnnnnnnnnnnnnnnnnnnnnnnnnnnnnnnnnnnnnnnnnnnnnnnnnnnnnnnnnnnnnnnnnnnnnnnnnnnnnnnnnnnnnnnnnnnnnnnnnnnnnnnnnnnnnnnnnnnnnnnnnnnnnnnnnnnnnnnnnnnnnnnnnnnnnnnnnnnnnnnnnnnnnnnnnnnnnnnnnnnnnnnnnnnnnnnnnnnnnnnnnnnnnnnnnnnnnnnnnnnnnnnnnnnnnnnnnnnnnnnnnnnnnnnnnnnnnnnnnnnnnnnnnnnnnnnnnnnnnnnnnnnnnnnnnnnnnnnnnnnnnnnnnnnnnnnnnnnnnnnnnnnnnnnnnnnnnnnnnnnnnnnnnnnnnnnnnnnnnnnnnnnnnnnnnnnnnnnnnnnnnnnnnnnnnnnnnnnnnnnnnnnnnnnnnnnnnnnnnnnnnnnnnnnnnnnnnnnnnnnnnnnnnnnnnnnnnnnnnnnnnnnnnnnnnnnnnnnnnnnnnnnnnnnnnnnnnnnnnnnnnnnnnnnnnnnnnnnnnnnnnnnnnnnnnnnnnnnnnnnnnnnnnnnnnnnnnnnnnnnnnnnnnnnnnnnnnnnnnnnnnnnnnnnnnnnnnnnnnnnnnnnnnnnnnnnnnnnnnnnnnnnnnnnnnnnnnnnnnnnnnnnnnnnnnnnnnnnnnnnnnnnnnnnnnnnnnnnnnnnnnnnnnnnnnnnnnnnnnnnnnnnnnnnnnnnnnnnnnnnnnnnnnnnnnnnnnnnnnnnnnnnnnnnnnnnnnnnnnnnnnnnnnnnnnnnnnnnnnnnnnnnnnnnnnnnnnnnnnnnnnnnnnnnnnnnnnnnnnnnnnnnnnnnnnnnnnnnnnnnnnnnnnnnnnnnnnnnnnnnnnnnnnnnnnnnnnnnnnnnnnnnnnnnnnnnnnnnnnnnnnnnnnnnnnnnnnnnnnnnnnnnnnnnnnnnnnnnnnnnnnnnnnnnnnnnnnnnnnnnnnnnnnnnnnnnnnnnnnnnnnnnnnnnnnnnnnnnnnnnnnnnnnnnnnnnnnnnnnnnnnnnnnnnnnnnnnnnnnnnnnnnnnnnnnnnnnnnnnnnnnnnnnnnnnnnnnnnnnnnnnnnnnnnnnnnnnnnnnnnnnnnnnnnnnnnnnnnnnnnnnnnnnnnnnnnnnnnnnnnnnnnnnnnnnnnnnnnnnnnnnnnnnnnnnnnnnnnnnnnnnnnnnnnnnnnnnnnnnnnnnnnnnnnnnnnnnnnnnnnnnnnnnnnnnnnnnnnnnnnnnnnnnnnnnnnnnnnnnnnnnnnnnnnnnnnnnnnnnnnnnnnnnnnnnnnnnnnnnnnnnnnnnnnnnnnnnnnnnnnnnnnnnnnnnnnnnnnnnnnnnnnnnnnnnnnnnnnnnnnnnnnnnnnnnnnnnnnnnnnnnnnnnnnnnnnnnnnnnnnnnnnnnnnnnnnnnnnnnnnnnnnnnnnnnnnnnnnnnnnnnnnnnnnnnnnnnnnnnnnnnnnnnnnnnnnnnnnnnnnnnnnnnnnnnnnnnnnnnnnnnnnnnnnnnnnnnnnnnnnnnnnnnnnnnnnnnnnnnnnnnnnnnnnnnnnnnnnnnnnnnnnnnnnnnnnnnnnnnnnnnnnnnnnnnnnnnnnnnnnnnnnnnnnnnnnnnnnnnnnnnnnnnnnnnnnnnnnnnnnnnnnnnnnnnnnnnnnnnnnnnnnnnnnnnnnnnnnnnnnnnnnnnnnnnnnnnnnnnnnnnnnnnnnnnnnnnnnnnnnnnnnnnnnnnnnnnnnnnnnnnnnnnnnnnnnnnnnnnnnnnnnnnnnnnnnnnnnnnnnnnnnnnnnnnnnnnnnnnnnnnncctctatctgtagtgcctcaatccttgttgtcgaatttgtttttatatgatgatttggtgtgattgccaccttgattgttatataaatcccgtgtttttgttgagttgatattttctggagataatttcattatggattattcatttgcaaataatttatttaataattttaaaaggaggaaaagtgttaaatattgaaatattattctgttgagtggttcactcctggatatttttattaagattttgtgcacattatggtcgagccatgggctccttattgtggaaaataatgtgttgttgatttatgtggcaagttgtaatatttaatcacttgtggtgcaatttatgagatgtcgtgatattgttgggacgtttgttcgggagtttgcacgaggcttatgtcgtcctattgttactattgatatatgcacatgcggcgtgacaaggtgggctatatatatatttgtgggtttgcgcatgtggcgagacaaggtgggaatattattatgcgcgtgcggcgagataaggcggaatttactttattattgcgcacatggcgagacaaggtgggctatgttggggatgatttgtaatgacttgtgatggtctgggggcgctgttgttgaaatttatttatgatttgggactaagaggcggtacctcggaagtgcccttttgttgaaatttctctatggctacacttgcctttggttatttaattttatttttccgtaatatgtaaattcttgtgttctccgtaatgtattatttgacttaatattaagtgttttgtatttattgtagtattatgttgactttggctttttcttacgagactctgaggatttgtatttctggtttgtacgtgtccttaatgattgagttattttaaataaaagaattattattatgttttaatttaatgagtttcatattcaaatcagtagcttatctgatgctttattttaactgaaatgtcactttccccactcaaactatttcaaaatttaattcatttctttgttgaatcttacttggtttaaaaattgtaaccttaatttattcaaaataaattgatcgtgcaaattttatgtattgatatatttggcgcgagagttgtccgtctggttgtgatagagatatgggcacgaggtgccgtgagaatatgaaagggggctgagacccgtattttatgatttttacataaagactattcaaaataaattgatcgtgcaaatttgatgtattgatatatttggcacgagagttgtccgtctggttgtgatagagatatgggcatgaggtgccgtgagaatatgaaagggggctgagacccgtattttatgatttttacataaagattatttattcgaagaaatatattcgtagggtatttattcgaaagaattatatgtgaaggatttatatttgaaggacttgtttaattggttgtacttgtgtttcttatcgtctgagtaataattatggtgttgttgctgccttgctgtttatatcactagttggttattgttgctatcactgctatttgttccctattattttgtatgctatattgcacaagttatttgactagtgagtgtcttgactgtacctcgtcactactccaccgaggttagtcttgatacttactgggtaccgactgtggtgcactcatactacacttctgcacatttttgtgcagagccaggtaaattggagtcagctgatcgctagctagctgtacatatcttgttgtggagatcatggtaaacatgttgctgcgctcgcaggcttccgagtcaccttccgatattgttcttgcactattttatttctacttaaaaatagttgtatttataggttttctagtaactcaatagagcttatgacttgtactaccggttttgggattgtaagtattgtatagagatttctacttcgcatttgtcagttgttaattaatattgttattatttcagtaaatgttaggcttacctagtccttaagactatgtgccatcacggcatcttatggagggagatctgggtcgtgacaatcgcatatttatctcgttaaaacttgattgaatgtcttattttgtataattacaatattttatcagatctaatatacttctaaactaaactcaattgatattctatttgtacaacccctcaacagttttaccttatttaaatcctaaattggcttaatgactcatttgatgcttcactgtatttaatttgtaaattgtatttaattttgtttaaattattcattgctcatcctgattgatattgatacagaaactatacacatggtagcacgaggtttttgtcgtgcaaaagtgattcagaaagatgtgggcacaagatgccatatgtgtaagaattggaagtcgtgaatcatgaattgagatttcgaggagttatacctcgggtaatttatgttgaaatacatgcattataaataatttaattgattgatttctcatatgattccttgcttggacctactcatatattatttgatctctgactatgtggttgcttaatcacttgattgttttctcgttgctacccgtattttcattgttttcattgttgatttgagtgagaaattcttctgttattggccttacattgttatccttttcttgttagctttatgtaaaattttgtacaggtttatatgtctggtaggtatcttgacatggcctcgtcactactctaccgaggttaggcttgatacttactgggtaccgtcgtggtatactcatgctacacttttgcacatctttttgtgcagatccaggtacctcaatgttgttgataatcttgctaattgattggacattgttgtggagacttaaggtatacccgttgtcgcgttcgcaggcctcagagtcaccttttgatattttcctgccctgttgattctattctggaacatttgtatttagagattttttctagtaatgtcacgacccaattttccctctgtatgacgtcgtgacgacacctagtctctacgactaggtaagcctaatatttttcggaataatgaaatgaaaacataaatttaacaacaaactatggcaacgacaacataactgggtaccatgccgcttggtatgtacaagaaccgtctattcaaaaatacacagaaatcctaaaacccggaacatcgtgaatcaaaaactacagatgaaaaatatagtgtctctatacatcaaagtctatcaaatgaaaatacagaagataatggacatggcgaagagtagaaggggactccgaggtctgcggacgtggaagatataccctgaagtctccaaagctttcccggctcactaataatgtggctgataaggagcacctggatctgcacacgaaaaacatgtgcagagagtagcatgagtacaccacaatcggtacccagtaagtgccannnnnnnnnnnnnnnnnnnnnnnnnnnnnnnnnnnnnnnnnnnnnnnnnnnnnnnnnnnnnnnnnnnnnnnnnnnnnnnnnnnnnnnnnnnnnnnnnnnnnnnnnnnnnnnnnnnnnnnnnnnnnnnnnnnnnnnnnnnnnnnnnnnnnnnnnnnnnnnnnnnnnnnnnnnnnnnnnnnnnnnnnnnnnnnnnnnnnnnnnnnnnnnnnnnnnnnnnnnnnnnnnnnnnnnnnnnnnnnnnnnnnnnnnnnnnnnnnnnnnnnnnnnnnnnnnnnnnnnnnnnnnnnnnnnnnnnnnnnnnnnnnnnnnnnnnnnnnnnnnnnnnnnnnnnnnnnnnnnnnnnnnnnnnnnnnnnnnnnnnnnnnnnnnnnnnnnnnnnnnnnnnnnnnnnnnnnnnnnnnnnnnnnnnnnnnnnnnnnnnnnnnnnnnnnnnnnnnnnnnnnnnnnnnnnnnnnnnnnnnnnnnnnnnnnnnnnnnnnnnnnnnnnnnnnnnnnnnnnnnnnnnnnnnnnnnnnnnnnnnnnnnnnnnnnnnnnnnnnnnnnnnnnnnnnnnnnnnnnnnnnnnnnnnnnnnnnnnnnnnnnnnnnnnnnnnnnnnnnnnnnnnnnnnnnnnnnnnnnnnnnnnnnnnnnnnnnnnnnnnnnnnnnnnnnnnnnnnnnnnnnnnnnnnnnnnnnnnnnnnnnnnnnnnnnnnnnnnnnnnnnnnnnnnnnnnnnnnnnnnnnnnnnnnnnnnnnnnnnnnnnnnnnnnnnnnnnnnnnnnnnnnnnnnnnnnnnnnnnnnnnnnnnnnnnnnnnnnnnnnnnnnnnnnnnnnnnnnnnnnnnnnnnnnnnnnnnnnnnnnnnnnnnnnnnnnnnnnnnnnnnnnnnnnnnnnnnnnnnnnnnnnnnnnnnnnnnnnnnnnnnnnnnnnnnnnnnnnnnnnnnnnnnnnnnnnnnnnnnnnnnnnnnnnnnnnnnnnnnnnnnnnnnnnnnnnnnnnnnnnnnnnnnnnnnnnnnnnnnnnnnnnnnnnnnnnnnnnnnnnnnnnnnnnnnnnnnnnnnnnnnnnnnnnnnnnnnctaacctcgatcgagtactgacgtggtcaggtcggtccctactggtatatatatataatgacacaagatagaatgaaataccgcagtaaaataaatactaaacttaataagaatgaaatcatagaagacaacaactcagtacacagagataataataggggttttcccgagataccgtctcgtagtcccaaacgtaaatgtttagtacaggggatctcgtggaataccgttctgtagtcccaaagtaaatatgcagtacatggggatctcccaaaataccgttctgtagtcccaaagtaaatatgcagtacagggggatcttccggaataccgttccatagtcccaaagtaaatatgcagctcaaccaacggaaataacagttatagcaagaaaccctacaattgagactaagttcaagttaaggaacaacaggaaacttcactaaaacatgctgcacggagttcagataaacagttaaggcaagtaggcatgctattttagtctaacaagatactacacatgttgataagactgaaacaacatgttgattttttagtagaaatcaggttttataggaattagcccgtgtacgtactcgtcacctcacgtacccggcgctcacatatcaaaacagtaccaaatcttaaggggagtttcccaaatactcatcacgctcagatttcgctatacagctcgaatagaaccgcaccatctgtgcacataaccaatgaatcacaactcctcgtagaataaatgagtaactcacagatcatttcagaacacgaaaaagatcaacatcaaccgaatggtacatccctcaataatagtagtatggagccaatcattccggctcagtgtagaatacagatcttgattgggcctaccaatggacccccaaattaactctggtcaaccacaataaataaataacccttcgaaattcacgatgacagagtcataatatataccattatctggctagcttcagccatgatttcacagtccgcaaccatgaaagaatctgttccaaatccatagaacacacgaatcaacatttctgattccatctccatcacccgaatgtctaacacatctctcatacacaatcatcccaccaggaatatttctcccattctttcttgccacatagcaacatcttaaaatgagcagtcgatcaaccaggaaaatgccgcaatacctaaaagaaatatccataattcaaagcatagtgcgccttctgaaatgtataaactactcacgcaataccaaatagtgatagcattcatctaaacattgaagactgttcatcccctcaaagaatttacgacctccctttcaaagcaaaactgtgaccttgcacacgccatccttaatcccgcacaacacaccgcatttatcatgccatcatttgaaaaatacgagaacctcataatcattctgagtcacaagtaaaatatatatctgatcagccagaagccttccatttgatcccacccgataaaaaaataacaatactcaacatgctccttaggccggtaggaaaatacccatcccaaaccgtggtagaaaacctcgagaatgctttggaatccacttgcacataatcacgccatcatagttgaatctatctaaatcaaccaagctacgcaagtccccaaacccaagaatattgccaccaaaacatctgtaaagtcttaccacatcgtaattatccaaaggaccaatcctaccattaccatactggtccagtctactacctagttgtcctatttctccgagtcccttacgaatttgtcttcaaattgatacttctccttgctaaaacaccacgatccttaaccacaactcaccccacgaaccctagcatagaaccacaacaccctacggcccttaagaaactatattcttcttaagcacttccataaataccacaattgtaacactcactctgaaaataccttatgtgaatttaaaattcttcttcttatcttccttatacaaaaatatagaatccatagtcatgcaaaatttctgaaagtccatgcaccatcaaataaaaatctcagattttatccatacgcaagtccggaaacattctcaattgctatatataattcccaaacacactagaattttctcgggagtcacccactttgctcaaatcaaaattacaccgcccaaatgggccaaaagacatgtgccccattagcacaacaacactcaaagaagtaactctactttaacaccacctatcaaattcatactccgtgcaaactacatcattcacaaataacaactcactcatcccacgatttttcatatactcatccgtgcaatataatctgtaaccaggatattttcttattcgagtcattttcgaactccacctctgtaagtcatcattgattcccaagtatacttcagacgcaaacaaaatttgacacatatccatgaattgatttgtctatagcaggctccaccacttggctcaaagccgtagattaaaacaattcataacttaccatactcatactctattattgtcatgatgctacagtcagttcaacaaaacctcttcacaaactcatgcaacgccaaccatagaaataccccaaatcatccgctaaactcgcaaccattctcttgacactcaagtcaactttcttagccagattcatattcaaatctccacccatacgccccatcggtagaaaagaaactctctactcacatcataaggaatgcacctacgtagattactccgcaggggatagcccacctgcttagccttaaactggtatcttgttataccctttcgcagtaataattactatgaaatcacttagtctatctgagtccaaacttattaaccagaaatgagagtttaatttgtcccaaaatttaacaatgtgaaagatccttcgaaatattcatactcgagactatacgtcacatcaaatcgaaaatcaagcacccaatggacttcctttaaatttcaaggaaacacttctcgtcatattccaatcgtcttaacatatctcgcggtcacatcatacccatcataccgccattctaccgctcatcgagccataaattccactatagggtcattaccagacatataagtctaattgcatgagttacaactgaagctaccgagcttaagctgcgatctaaacctggcctcaagtcctccagactggcccatcaccaaaacacataatacacatctcaaacctcattcatagaatcacaagccggcgatgcacaactgatactgagtgctcatgtgcgcatacaaataagtggaaggaatgcaacgagttatgtctcaagctgaatcaatctcgcatgataaagaaagaaagatgggaagtatatatcctaaatgccctgtagcctctcgaagataagtatggacgtcatcatannnnnnnnnnnnnnnnnnnnnnnnnnnnnnnnnnnnnnnnnnnnnnnnnnnnnnnnnnnnnnnnnnnnnnnnnnnnnnnnnnnnnnnnnnnnnnnnnnnnnnnnnnnnnnnnnnnnnnnnnnnnnnnnnnnnnnnnnnnnnnnnnnnnnnnnnnnnnnnnnnnnnnnnnnnnnnnnnnnnnnnnnnnnnnnnnnnnnnnnnnnnnnnnnnnnnnnnnnnnnnnnnnnnnnnnnnnnnnnnnnnnnnnnnnnnnnnnnnnnnnnnnnnnnnnnnnnnnnnnnnnnnnnnnnnnnnnnnnnnnnnnnnnnnnnnnnnnnnnnnnnnnnnnnnnnnnnnnnnnnnnnnnnnnnnnnnnaataccaccttatcacgacccaaaatccaactaatcgtaatagcacctaacccaacccgttaggtaagtcaattaccaactatccaattccaaaaataattattaaagcaatttaagtgaataaaggtcttaatcttatacaatccccaagaaccggtagtgcaaatcatgagcttctaagaatagagtttacaaagcgaaaatgaaataaatacatagtctgtttgaataatatataaatagagcttttataaaatctaaggctaccatgaacaagaggcagctataacaggaacgcaggtacatcttcaaatacggcaaccatcgagcacagtaacaacaacagccaatatctgcatgtaatgtgcagaagtgtagtatcagtacaaccgaccccatgtactgagtaagtaacaaacctagccttaggttgaaagtagtgacgagcttcaccaaggtcgggtccaaaaccaatagtccacaacagtccataacaacataaagcaaataataccataagtaactcaagatatagatgctcggcaaaatcatgatttcaaaataatagttcttcctttcaagtacatctgtgaaaacccaaatcgtttaccaaagttgccgaaaatatgaataagtttgaaaacaaaaaaattttcaaaaatcctttcaacaataaatgagatgtttcattttccttctagataacccgtgtaaaaacaaatgcatcactatgcccatctgtcaaaaatgtgtgaaaatcatgaatgatgtgatggagtacaccatgaggaaaatacatctctatgcttgtatgtcatgtgtgcatgccaatgcgatgcaactaaatggtaaaatcataaacagcccctcgggcagacctcacaatcactcgtatacaacccctcaggcttacctcataatcactcgtaaacaacctctcgggcatacctcactatcactagtaaatagcccctcgggcatacctcaccatctctcatgcctcacagtcactcagcactcggcactcggcattcgcactcagtaggtacctgcgctcaccgggggtgtgcacagactccggagaggctcctacagcccaagcgctataatctgcatggacaactcatgtgctgcacagacaactcacgtgctataatatcatatcagaattcgcattgacaactcacatgccataataacccaataaggcctactgcaggctggcagccccgatccatataatagtgataatatatataaagccaatatggcctgctgcagcgtgcagcccgatcccaaaaatatccttacaatcaggccctcgcccttcctcagtcatcaatctctccagtctctctctcatgggctcacaatgtcatgagaatagcccaaaaattatgatatgatgtattaataaataacagagactaagatatgatatgtaatgaaatgaatatgactgagtatgaattttcaatttaaaacaaataattcacagtaatataacctttgtaggtcccaaaaatactggcacatagcctcaacatgatttttaatatgattcttagctcaatttctttaacacataaaactgcatggaaaatgccaagattatttgactataaaattccacgaaacaattacgtcacaatttctatnnnnnnnnnnnnnnnnnnnnnnnnnnnnnnnnnnnnnnnnnnnnnnnnnnnnnnnnnnnnnnnnnnnnnnnnnnnnnnnnnnnnnnnnnnnnnnnnnnnnnnnnnnnnnnnnnnnnnnnnnnnnnnnnnnnnnnnnnnnnnnnnnnnnnnnnnnnnnnnnnnnnnnnnnnnnnnnnnnnnnnnnnnnnnnnnnnnnnnnnnnnnnnnnnnnnnnnnnnnnnnnnnnnnnnnnnnnnnnnnnnnnnnnnnnnnnnnnnnnnnnnnnnnnnnnnnnnnnnnnnnnnnnnnnnnnnnnnnnnnnnnnnnnnnnnnnnnnnnnnnnnnnnnnnnnnnnnnnnnnnnnnnnnnnnnnnnnnnnnnnnnnnnnnnnnnnnnnnnnnnnnnnnnnnnnnnnnnnnnnnnnnnnnnnnnnnnnnnnnnnnnnnnnnnnnnnnnnnnnnnnnnnnnnnnnnnnnnnnnnnnnnnnnnnnnnnnnnnnnnnnnnnnnnnnnnnnnnnnnnnnnnnnnnnnnnnnnnnnnnnnnnnnnnnnnnnnnnnnnnnnnnnnnnnnnnnnnnnnnnnnnnnnnnnnnnnnnnnnnnnnnnnnnnnnnnnnnnnnnnnnnnnnnnnnnnnnnnnnnnnnnnnnnnnnnnnnnnnnnnnnnnnnnnnnnnnnnnnnnnnnnnnnnnnnnnnnnnnnnnnnnnnnnnnnnnnnnnnnnnnnnnnnnnnnnnnnnnnnnnnnnnnnnnnnnnnnnnnnnnnnnnnnnnnnnnnnnnnnnnnnnnnnnnnnnnnnnnnnnnnnnnnnnnnnnnnnnnnnnnnnnnnnnnnnnnnnnnnnnnnnnnnnnnnnnnnnnnnnnnnnnnnnnnnnnnnnnnnnnnnnnnnnnnnnnnnnnnnnnnnnnnnnnnnnnnnnnnnnnnnnnnnnnnnnnnnnnnnnnnnnnnnnnnnnnnnnnnnnnnnnnnnnnnnnnnnnnnnnnnnnnnnnnnnnnnnnnnnnnnnnnnnnnnnnnnnnnnnnnnnnnnnnnnnnnnnnnnnnnnnnnnnnnnnnnnnnnnnnnnnnnnnnnnnnnnnnnnnnnnnnnnnnnnnnnnnnnnnnnnnnnnnnnnnnnnnnnnnnnnnnnnnnnnnnnnnnnnnnnnnnnnnnnnnnnnnnnnnnnnnnnnnnnnnnnnnnnnnnnnnnnnnnnnnnnnnnnnnnnnnnnnnnncacacccacacgcccgtcacctagcatgtgcgccacctctaaacaattcacataatacgtatatttagggttcataccctcagcttcaagattagaagaattacttactttgaacaagccaaatccaatgccgagcaagctaaacaatgctctagaaatcccattatgcgcgtatcaacttccgaacggctcgaatctagtcacatttaatttgattcagtccacacaacttataggaattaattcaatatcaaaatattaatattttccacaaaaattagaaattacgccccaaacatcacccgtggggtccatgtctcgaaatacatgaaactcaaaaaatacaacaacccatcccattacaagttcaaccatactaatttcactcaattccgacttcaaatcgatgttcaaaactcaaaagaaaatatattatgaacatttagtccaacaccccaaattttctctttaaatttatcaactaatttctaaaaatgaagatagattcatggaatattatcacaaggaagttaagaacacttaccctaaattgtgtggaaaaattcctctccaaagtcgcccaaacagagctccaaaatgagaaacaatctcggaaccatcgtttttaacactgcccaggcatttccgcacctgcgatgcctgggctcgcacctatgcatctgcttttgcggacaaaaatgcacgcctgcgaaaacagccggcgttcaaaaatctcgcatctgtggcacccttctcgcatctgcggacacgcagatgcgcattaaccttcgcagatgcggcctcgcagatgcgggcaaattctcgcacctgcgagcactgcccagttccactcttagtcgcttctgtgactgatctcgcgcacgtgcggcttcgcacctacaatcaaaagctttgcatgtgcgatcacaccagtaggcagcagttccagcatttccttaagtccaaatttgatccgttaaccatccgaaaatcactcgaggcctccgggacctcaaccaaatacaccaccaagtcctaaaacacaccacggacctacttgaggcctcaaatcacatcaaacaacctcaaaaatacgaaatacacatggattcaagcctaataaattttgaaatttccaaattctacaaacgatgccgaaacctatcaaatcacgtccgattgacctcaaattttgcaaacaagtcgcatttcacattacggacctattcaaatttccagaatcggattctgaccccgatatcaaaaagtcaaccccccggtcattcccaaaatttaactttcgacaattgaagcctagttccactaagtacctccaaataagtttccgaccaaaatcaccatacggagctattggaatcatcaaaactctatttctgggttgtttacacataagtcgacatccggtcactattttaaacttaagctttaaaccttggaactaagtgttctaattcattccaaaacctcaccagacccgaaccatttactccggcaattcacacaacaactgtaaaagtacaatttgaatagtaaatggggaaacggggttgtaatactcaaaatgaccaaccgggtcgttacacggagctggtttgatgtgattcacatgtccagttgttaaaatagaagttctaaagttttattgaaaatttcatttgatttggagtttgattcgtagttctaggcattatttcggtgttttgatcgctcacacaagttcgtatgatgtttttggacttgtgtgcatatttggtttggagccccgatgtcacgacccaaaatccgaacctgtcgtgatatgcctatctcaatactaggcaagccgattacctcaataaacaacaatttcttctaagtttgaaaatataatatttaaacacaatctaaaaatcttgcaaataatgatacaaacactcacaaaacctggtgtcactgagtacatgagcatctatacattacaattctggaaaacacggtatataataacatgagaccaaatacaataaacaaaaggatagggaaggagagacaaggtttgcgaaacatgatagctatctctaaatctccgaaaaatcgactgtgtccgagatcacctgtatctgcacacgaagtgcatggtgtagtatgagtacaaccaactcagtaagtaacaataatatataaggaactgaaagtagtgacgagtttctcagctaagtctaaatacaatactttccaacataaaaaggtaggcatgctttcaagttcaacatttaaaactccacagtaattttataacaacttcgaatgaaacagaagannnnnnnnnnnnnnnnnnnnnnnnnnnnnnnnnnnnnnnnnnnnnnnnnnnnnnnnnnnnnnnnnnnnnnnnnnnnnnnnnnnnnnnnnnnnnnnnnnnnnnnnnnnnnnnnnnnnnnnnnnnnnnnnnnnnnnnnnnnnnnnnnnnnnnnnnnnnnnnnnnnnnnnnnnnnnnnnnnnnnnnnnnnnnnnnnnnnnnnnnnnnnnnnnnnnnnnnnnnnnnnnnnnnnnnnnnnnnnnnnnnnnnnnnnnnnnnnnnnnnnnnnnnnnnnnnnnnnnnnnnnnnnnnnnnnnnnnnnnnnnnnnnnnnnnnnnnnnnnnnnnnnnnnnnnnnnnnnnnnnnnnnnnnnnnnnnnnnnnnnnnnnnnnnnnnnnnnnnnnnnnnnnnnnnnnnnnnnnnnnnnnnnnnnnnnnnnnnnnnnnnnnnnnnnnnnnnnnnnnnnnnnnnnnnnnnnnnnnnnnnnnnnnnnnnnnnnnnnnnnnnnnnnnnnnnnnnnnnnnnnnnnnnnnnnnnnnnnnnnnnnnnnnnnnnnnnnnnnnnnnnnnnnnnnnnnnnnnnnnnnnnnnnnnnnnnnnnnnnnnnnnnnnnnnnnnnnnnnnnnnnnnnnnnnnnnnnnnnnnnnnnnnnnnnnnnnnnnnnnnnnnnnnnnnnnnnnnnnnnnnnnnnnnnnnnnnnnnnnnnnnnnnnnnnnnnnnnnnnnnnnnnnnnnnnnnnnnnnnnnnnnnnnnnnnnnnnnnnnnnnnnnnnnnnnnnnnnnnnnnnnnnnnnnnnnnnnnnnnnnnnnnnnnnnnnnnnnnnnnnnnnnnnnnnnnnnnnnnnnnnnnnnnnnnnnnnnnnnnnnnnnnnnnnnnnnnnnnnnnnnnnnnnnnnnnnnnnnnnnnnnnnnnnnnnnnnnnnnnnnnnnnnnnnnnnnnnnnnnnnnnnnnnnnnnnnnnnnnnnnnnnnnnnnnnnnnnnnnnnnnnnnnnnnnnnnnnnnnnnnnnnnnnnnnnnnnnnnnnnnnnnnnnnnnnnnnnnnnnnnnnnnnnnnnnnnnnnnnnnnnnnnnnnnnnnnnnnnnnnnnnnnnnnnnnnnnnnnnnnnnnnnnnnnnnnnnnnnnnnnnnnnnnnnnnnnnatgataaatgacagctgaaatgcagcaataatgaaatcattgcatcctctcatagtaacattcactcagttctcccattcactccagccttacagtcaatctttcctcacagtcactcatgcaggagcggagctgggctggcctgggcagggtgcaggtgtgagggagttaaccgcatctgcgagcctgcaggtgcgagcgaggctctgcagatgcggagttgaggaagaggcatgttctgcaagtgcgagtgatggagcgcaaaagcggttccgtaggtgcggttagggggtcgcaggtgcaaaaatcctagacagaatgctaaaaatcgaggagtccgagattttgtcatttttgatatttccaaaagcgggtgaggcgagttttgagcgataaatcacgagaaattttgaggtaagtcacttgtgatcattgttagtcaataatatagaattatcatcgaataatctgactacgtttcatgtttttgaggtgtaaatcagagatttgaacttagggatttgaaaataatatttgaagatttggaggtcgagttgaggtcggattttggtaaaattggtatgattagactcgtggttgaatgggctttcgaattttgtaccttttgatgggttctgagacatgggccccacgggtgatttttgagataaatttcggattttgatggaaaattaatattttgttatggaattaattccaataatattttttgactgattcgaggcgtttaaggtaagtaacagttctaaatttggtcctgagggtatgaaaccctggattatgtgttttgtgattggttttaaggtgacgcacatgctaggtgatgggcgtgtggacgtgcaccgtaggaattgtgacttggtcaaattccatggaactgtatagttgaataatcagttgatatccatacatttttccccgtattagagaaactgatctatgaatcatgtttaaataatatgtttacactgttgggacccacagaggtcatgtacttgtggaattatcagctaaattattgtttttcactaagtcacagttctatttgcacattattacatcagtctctcttattcatgatttctgagagcccgagagactggagaggttgatgactgagtgaggccgagggcctaattgtgaggatatttataggatcgggctgcacgctgcaacatgtttattttttatatgccatgattggcttgatatagtgcttgggctgaaggaacccttccggagtctgtacacacccccagtgagcgcaggtacctacttagtgcgagtgccgagtgctgagtgattgggaggattgagtgattgtgaagaaagagtggctgtaaggctggagtgaatgggatgacttagtgactgttactctgagaggatgcattactttcattattgctgcatttcagctgtcatatatcactgttttagaaaatttctaaaagacatcattttctgtttcattcgaagttgttataaagttattatggagaagctcgtcactacttccagttccttatatattattgttacttactgcgttggttgtactcatactacaccttgcacttcgcgtgcaaatccaggtgatcccagacacagagggtgttaattctgtcacacagtcgatttttaggagattcagaggtagctgccatgtttcgcagaccttgtctctccttccctatccttttgtttattgtatttggtcttagattattatggaccatgttttccagacttgtaatgtatagatgctcatgtacttagtgacaccaggttttgggagtgtttgtattgatttttgcgagatgtttggattgtgtttaaacattatattttcaaacttagaagatattgtggtttattgaggttgttggcttgcatagtattgagataggcgccatcacgacaggttaggattttgggtcgtgacacccgagggctcgggtgaattttggataggctacgggtggtttggaacatagaaaatctagtttttccttagcttcagttgtcatcgggtttccttctttgcgttcgcgaaggtactctcgctagcgcggagagtgaactgggctgggtgggatattaccctacgcgaacgcgaagggctgtacgcgaacgcgaagtgaaggggggctgcccttcatgaacgcggacagtgtatcgcgaaagcgtatgtttgtggacctggaggagaggaaatcaatcaatgctcttcgcgaacgcgaagggtatctcacaaacgcataggctatttgagccactgcatcgcgaacgtgacaagccttcgggaacacgaagaaggcctgacgcccagtgtcaagacccgaaattcccatattctggatcgtgatagcgcctaacatttcactttctaggcaagccaacattagaatataattagccattttaacacaattgtaaattaatcaataacatagaaacaaatgcggaaataaagtctgaaataaagtgaataatttgtaatgaacgcgatatctaaataccatcccagaactagagtcacaagttcacgagcttctagagtaatatttacaagggtatgaaataaatacaaagttgtctgaatgaaaatacacagctaaataaaaataaagacggggacttcaggagctgcgagtgctgagcagttgtacctcaagtctccgcaggctgtccaatccgagctttctagtagtcgccgctgggaccgtctccaaaatctgcacagtgtgcagagtgtagtatcagtacaaccgaccccatgtactggtaagtgtcgagcctaacctcgacgaaagagtgatgaggctaaggcgagtcacctactctacaaccttaactcagtatataatcatgacagaaaattggaatactgaacagaattaaacagccaactgaaaataataaccgcagccttaagaataagccaatgtcgtccagaatcaccaatctttaataattcagatacaaataacataagaaaaccaacacagctcaagaagtggaaacatataggttattgcggtgcgcaacccgatcccaccagacaacacaaattcctcccttatttcaccgtaacgatatcaacaacagtacataatatatacatgttgcggcacacaacccgatcccaccatatgtcaatatcagtatcataattcaccattatttcaccatgtcaatccacccttattccacctgttgcggcatgcaacccgatcccaccgtatagtacaaattcacccttattccacctcaacatatcatccttatttcacttattgcggcgtgcaacccatatcccaccatatcaatatgaagtactcaataagcatagtaaaactcacaattcaaatcatagaaaaaccctattacaattccaagacaccaaactgaacaaataggaaaccttgtacaatatgataatccaaataagtaatactacacatcgagaccaatccagaatttacaactacaacgtaaagataaaccaacttgagcaaatagtaggagattatgaaaccacggaaagaactaatattatgaataggaggaaacaaagacaacaaataggaatttggcatgtaaacacatttagagcatataacaaataagacagggaaagagataatataagaagaacggggaaacagggaaaaacagataattcagcggcgcataagcacccgtcacctcacatatatgccgctcacatgaaattcacatagcaaatagtctgagggttcctaattccctcaagtcaaggttagacatgacacttatctcgctccaaaggccactcaatgctcaattaccgcttttcctctagaatccacttccaagccactcgtatctattcacaaatgactcaataatatcaaatattgctaaagaaatcaattacaatgtataaatttagattcccaaactttccctcaaaaagtcaaaaattgaccccgatcttgcttggtcaaaacccgaggttcggaccaaaatccatttatctgttcaccctcgagcccgattatataattagtttcggaatgcgacccaaaattgaggtctaaatccccaatttgcaaaaacccccaattcttcctaaatcactagttttctaccatgaaagaacaaagattaaggctagctatttaatgagtgatgttataaatggaagaaaatgagttaaatagtacaaacctatgaattggtgttgagttttctcttcaacatcgcatctaggccgagttctaatggagagtttatgaaacatggataaaatcctgttttggttctattttaaggtctgggcgtcaggccttcttcgcgttcgcaaagggcctgccgcgttcgcgatgtgcagccacccgagtggattttgcgttcgcgagtcctccttcgcgttcgtgaaggttgttcccccctggcctttgcgtttgcgagccaatgctcgcgttcgcgtagaagaatgaatgatcgctcccccaagtccctaaatcttcacattcgcgagaaactggtcgtgttagtgaatggtaagggccccattgattcgcgttcgcaacccagctaccgcgttcgcgattaagaaaatcaccctgccctagtttactcttcgcgttcgcgagagtacctccgcgaacgcgatgaaagaaacaccagaaaacagttgaagccaaaaaccagattttttctaagtttcaaaacacccgtagcctatccgaaactcacccgagccctcggggctccaaaaccaaacatccacacaagtcccaaaaacatcatacgaactcactcgcgcgaccaaaacatcaaaataatgcctagaactacgaatcagacaccaaatcaaatgaaattatcaagaaaactttaaaacttctattttcacaacctaacgtccgaatcacgtcaaataaactccgtttctcacaaaatttgacagacaagtcataaatattatagtggacctataccgggctccgaatacaaaatacggacccagtatcaacaagaccaaacatcagtcaattctaaaaatcattatacattcaaacttttaatatttcatctaaaatccatgtctcgagctagggaccttggaattcgattctgggcatatgcccaggtcccaaattacgatacggacctaccaggagcgtcaaaacacatatccgagtccgtttactcaaaatgttgaccgaagtcaactcaaattaatttttaacgcaaaaattcttatttttatcagttttttaacataaaagcttttcagaaagatgcccggactatccacgcatatcgaggaaggctaaaacatgatttttaaggcttcagatcatagaattaggtttcaaaacatgagataacctatcgagtcatcacacccagtgattaaaacatatcaaaaatgggatttttcccatggaatcaattcctacaatttgtattgagtatatttaattgtttatgactagatttgaagatttcggatacgaatccgcgaggcaaaggtttattgaaatcttgaatttggttgcaaagcgagataagtgtcatggttaaccttgacttgaggtaatagaacccttgaattatttgttacatgaatttcatgtgtaacgatgtatagtgttatgacccaattcaatgtcaggtcgtgatggcgtccaacaccgttgctagacaagccaacagtgaacaacttagtgatttcccttatttttattaagcaattccaacatttagcttatttacatttaaagcatttgataaacaacggatttttaaggcaaaccaacggaaacatctaaaagcagttataactattgaactacaacccaaaatcaaagtctactaatacgtgccaagatctagtgttacaagtgtgtggacgactagtagaatatacaaaagatgactatcctactgtctgaaacagaatagatagataaaacaaaagagaaactccggcatgctgctgaacgactcagaagggggcagctcaccgtgaaatctcggtccaagatcaggtatgcacgccaggcgggtaactagaatcaccagcctcagatcctgtacaattaagtacagaagtgtagtatgagtacataaacaatatgtacccagtaagtatcccgcctaacctcgannnnnnnnnnnnnnnnnnnnnnnnnnnnnnnnnnnnnnnnnnnnnnnnnnnnnnnnnnnnnnnnnnnnnnnnnnnnnnnnnnnnnnnnnnnnnnnnnnnnnnnnnnnnnnnnnnnnnnnnnnnnnnnnnnnnnnnnnnnnnnnnnnnnnnnnnnnnnnnnnnnnnnnnnnnnnnnnnnnnnnnnnnnnnnnnnnnnnnnnnnnnnnnnnnnnnnnnnnnnnnnnnnnnnnnnnnnnnnnnnnnnnnnnnnnnnnnnnnnnnnnnnnnnnnnnnnnnnnnnnnnnnnnnnnnnnnnnnnnnnnnnnnnnnnnnnnnnnnnnnnnnnnnnnnnnnnnnnnnnnnnnnnnnnnnnnnnnnnnnnnnnnnnnnnnnnnnnnnnnnnnnnnnnnnnnnnnnnnnnnnnnnnnnnnnnnnnnnnnnnnnnnnnnnnnnnnnnnnnnnnnnnnnnnnnnnnnnnnnnnnnnnnnnnnnnnnnnnnnnnnnnnnnnnnnnnnnnnnnnnnnnnnnnnnnnnnnnnnnnnnnnnnnnnnnnnnnnnnnnnnnnnnnnnnnnnnnnnnnnnnnnnnnnnnnnnnnnnnnnnnnnnnnnnnnnnnnnnnnnnnnnnnnnnnnnnnnnnnnnnnnnnnnnnnnnnnnnnnnnnnnnnnnnnnnnnnnnnnnnnnnnnnnnnnnnnnnnnnnnnnnnnnnnnnnnnnnnnnnnnnnnnnnnnnnnnnnnnnnnnnatagggccaatataatgtaattaaagtgttatgttaggtatagatattatgaataattctgacaattcaataacgggaagagataagtacttctttcaaaaatacaaatttcaatttcggtcatatcatttaaccacttacatttcaaggcatttaaactacctaaatcacggagagttccaaatacttaacatacgcaattatgcctaggtcgtacggcccgatccaacataatattaaattgtgcactgccggagggtcgaacggcgtgaaccatagatgcacctattttctaccgatgcgctcggcccgatcaacaaatagcaattatttttaaggaaacacgaattctcattttacaatcaagtattctaataaactctttaaataggtgaacttagccctttttcnnnnnnnnnnnnnnnnnnnnnnnnnnnnnnnnnnnnnnnnnnnnnnnnnnnnnnnnnnnnnnnnnnnnnnnnnnnnnnnnnnnnnnnnnnnnnnnnnnnnnnnnnnnnnnnnnnnnnnnnnnnnnnnnnnnnnnnnnnnnnnnnnnnnnnnnnnnnnnnnnnnnnnnnnnnnnnnnnnnnnnnnnnnnnnnnnnnnnnnnnnnnnnnnnnnnnnnnnnnnnnnnnnnnnnnnnnnnnnnnnnnnnnnnnnnnnnnnnnnnnnnnnnnnnnnnnnnnnnnnnnnnnnnnnnnnnnnnnnnnnnnnnnnnnnnnnnnnnnnnnnnnnnnnnnnnnnnnnnnnnnnnnnnnnnnnnnnnnnnnnnnnnnnnnnnnnnnnnnnnnnnnnnnnnnnnnnnnnnnnnnnnnnnnnnnnnnnnnnnnnnnnnnnnnnnnnnnnnnnnnnnnnnnnnnnnnnnnnnnnnnnnnnnnnnnnnnnnnnnnnnnnnnnnnnnnnnnnnnnnnnnnnnnnnnnnnnnnnnnnnnnnnnnnnnnnnnnnnnnnnnnnnnnnnnnnnnnnnnnnnnnnnnnnnnnnnnnnnnnnnnnnnnnnnnnnnnnnnnnnnnnnnnnnnnnnnnnnnnnnnnnnnnnnnnnnnnnnnnnnnnnnnnnnnnnnnnnnnnnnnnnnnnnnnnnnnnnnnnnnnnnnnnnnnnnnnnnnnnnnnnnnnnnnnnnnnnnnnnnnnnnnnnnnnnnnnnnnncgagtaactgaattagcaagtaagggcataaacatttcgaataaggtatgatacggttcctaaactacccaaacaatagcacaatagtagctacatacagactcttgtcacctcgtatgtatgtagcccccacaaataggtacacacatttatttaattcacttagggggttaattccctcttacaaggttagaaaggagacttacctcgactcaaagcctacttcccaattgaagaacgcgctcaaacctccaaatttgatgccaaatgactcgaagctagtcaaacatgacataaactaatcaatctatgctcaaaagttcataattccactatttaagtgattacccaccctaaattgcaagcttcctaaaatttaccctcgggcccacatgctcggatttcggaaatttttaaagaatgttgttacccataaccttaggaacataaatatatgatttttactaaattccataacaaatttcgtggttaaatctagtttttatcaaaaacctaggtcttccaaaagctacgtgaaagcccctctcaagaagctccaagaatcgcccacgaagtgagtgaaatgagtaaaaattggtctaagtaccgtattaaatgaatcttactgcctccagcttttcggcacctgcggtcaagggaccgcatctgtgccatcgcttctgcggacgagagtccgcttttgcggaagttcctgggccggttgggccgcttctgtggccgttttaccgcttctgcggtcccgattctacgatgaaggggctgcttctgcagaatttggggctaccctcattggccacatctgagagccttggcccgcatctgtgagctctcacctgcagctaactaaccgcaagtgcagttatgacagatctggtgcactcagctgtagttccaaattctcaacttagtccgagcctcatccgattggcactcggggcctcgcccgaacataccagatctgtcaacttagtccgagccttgtctgtggcacccaagcctcgtccgattggaatcacaaaatagactcgctcgaactcaaggaatgctcgaaacaacatataaactaagaatcacaccctaaaaccaattgaatcaaacttaagagcttcaagttctttaatttacttccaatgcgccaaaacgtacttatactacttggaatgacaccaaattttgcgtgcaagtctaaaatgacactacagaactattcactacctcgaaattccatttggacctcgatatcaccaaaacctactccaaaccaaatttttaaagaacttttaaaatcttcaagaaccaactttcactattaggcaccaaaacactcccgagtcatccaaaacccgatccgagtatatgcccaaatctgaaatcctcatacaaacctattggaaccgtcagatcctgattccgaggtcgtttactaaaaatgttgaccaatgtcaaacttggcctttcaagcgaaccttaaggaaccaagtgttcggatatcaacccaaactcttctaaatcccgaacaaaacatccctggaagtcataaataaataaaagcaagtacgagaagtattatttaggggaataaggtcctataaagtaaaacgaccagtcggttcgttacattctccacctcttaaacaaacgttcgtcctcgaacgagtttagatccatacctgaagtgctgaataagtgtggatatttgctctgcatgtcctcctcggactcccaggtcgcctcctcgactggttggcccctccactgaacctttaccgtagaaatcctcttagatctcaattggcggttctgtctagcaacaattgcaactggctcctcttcataacccaagctctcatctaactaaatagtgctgaaatataacacatgtgacaagtcagcatgatatctctggagcatagacacataaagcaacctcaaataggccaccttataggctgggaggtaaagcaagctcataagcaacctccccaactcgcctcaaaacataaaatgggcctataaaccttgggctcaacttgttcttctttccgaatctcataatacccttcatcggcgagacatttaagagaaccttctcaccgaccataaatgatacatcgtgcgccttctgatcagcacaacttttttgtctggactgtgctgtgccaaattgctcctgaatcaactttacctttaccaaggcatcctttaccaaatcagtaccatataatctagcctcgccgagctcaaaccacccgatgggagaacgacatcgccgacaatataaagcctcaaatggagccatctcgatgctggactgataactgttgttgtaagcaaactcggccaaaggcaagaacagatgccactgtcccccaaagtcaatcacacatgctctcagcgtgtcctccaatatctgaactgtccgctctgactggccgtcggtctgtggatgaaatattgtgctgagctctacacgggtcactaactcactccatacggctctccaaaaatgtgaagtgaattgagggcctctttctgatatgatggaaataggcacaccgtgcaaccgaactatctccctaatacaaatctgggccaacttctctgaagtatatgtagtcacaaccggaataaagtgtgccgacttggtcaacctgtcgacaatgacccaaactgcatcaaacttccgcaaggtccgnnnnnnnnnnnnnnnnnnnnnnnnnnnnnnnnnnnnnnnnnnnnnnnnnnnnnnnnnnnnnnnnnnnnnnnnnnnnnnnnnnnnnnnnnnnnnnnnnnnnnnnnnnnnnnnnnnnnnnnnnnnnnnnnnnnnnnnnnnnnnnnnnnnnnnnnnnnnnnnnnnnnnnnnnnnnnnnnnnnnnnnnnnnnnnnnnnnnnnnnnnnnnnnnnnnnnnnnnnnnnnnnnnnnnnnnnnnnnnnnnnnnnnnnnnnnnnnnnnnnnnnnnnnnnnnnnnnnnnnnnnnnnnnnnnnnnnnnnnnnnnnnnnnnnnnnnnnnnnnnnnnnnnnnnnnnnnnnnnnnnnnnnnnnnnnnnnnnnnnnnnnnnnnnnnnnnnnnnnnnnnnnnnnnnnnnnnnnnnnnnnnnnnnnnnnnnnnnnnnnnnnnnnnnnnnnnnnnnnnnnnnnnnnnnnnnnnnnnnnnnnnnnnnnnnnnnnnnnnnnnnnnnnnnnnnnnnnnnnnnnnnnnnnnnnnnnnnnnnnnnnnnnnnnnnnnnnnnnnnnnnnnnnnnnnnnnnnnnnnnnnnnnnnnnnnnnnnnnnnnnnnnnnnnnnnnnnnnnnnnnnnnnnnnnnnnnnnnnnnnnnnnnnnnnnnnnnnnnnnnnnnnnnnnnnnnnnnnnnnnnnnnnnnnnnnnnnnnnnnnnnnnnnnnnnnnnnnnnnnnnnnnnnnnnnnnnnnnnnnnnnnnnnnnnnnnnnnnnnnnnnnnnnnnnnnnnnnnnnnnnnnnnnnnnnnnnnnnnnnnnnnnnnnnnnnnnnnnnnnnnnnnnnnnnnnnnnnnnnnnnnnnnnnnnnnnnnnnnnnnnnnnnnnnnnnnnnnnnnnnnnnnnnnnnnnnnnnnnnnnnnnnnnnnnnnnnnnnnnnnnnnnnnnnnnnnnnnnnnnnnnnnnnnnnnnnnnnnnnnnnnnnnnnnnnnnnnnnnnnnnnnnnnnnnnnnnnnnnnnnnnnnnnnnnnnnnnnnnnnnnnnnnnnnnnnnnnnnnnnnnnnnnnnnnnnnnnnnnnnnnnnnnnnnnnnnnnnnnnnnnnnnnnnnnnnnnnnnnnnnnnnnnnnnnnnnnnnnnnnnnnnnnnnnnnnnnnnnnnnnnnnnnnnnnnnnnnnnnnnnnnnnnnnnnnnnnnnnnnnnncggtaacccaaccacgaagttcatggcaatgcgctcccatttcctttcaggtatagtcatttgctgaagtaggccacctagcctctggtgttcatacttgacctgctggaaatttagacacctagccacatactcaactatgtctttcttcatccgccgtcaccaatagtgctgtctcaggtcatgatacatcttcatagcacctggatgaatagaatacagagaactgtgtgccttctctagaatcctctccctcaagccatcgacattaggaacacacagacgaccatggagtcgcagaaccccatcatcgctaatagaaacctccttggtattaccctgtagtaccatctctctaagaactgccaaatgtggaacatcaaactgccgagcctttatctaccccaatagtgaagactgggcaacaacacatgtaagaaccaggttgggctctgaaatatccaacctcataagtctgttagccaaggactgaatgtccaaagctagtggtctctcccctgccgaaataaatgtcaagctacccatactctctgcctttctgcttaaggcatccgcgaccacatttgccttgcccggatgataaagattggtgatgtcataatgcttcagtaactcgagccatctacgatgcctcaaattgagatccctttgcttgaacaaatattgtaagctgtgatgataagtataaacctcacatgacacctcatacagataatgcctctatatcttaagagcatgaacaatcacggctaactctagatcatgcacagggtaattcttctcatgaatcttcagctgacacgaaacatatgcaataactcccccctcctgcatcaatacacaacccaagacaatgcgtgaagcatcacaatataccgtatatatccccgagccagaaggcaacactagaaccggtaatgtagtcaaagctgtcttgagcttctggaagctcgcctcacaatcatcggaccaacggaacggagcacccttttgggtcaatctagtcagaggtgttgcaatggatgagaaaccctacacaaatcggcgataataacctgctaaccccaggaaacacctgatctcggtcaccgaagtgggacgaggccaactctgaactgccttaatcttcttgggatccaccttaccttctcctgataaaatatgccccaagaatgccgcataatctagccaaaacacacacttggataacttagcatatagcttctgttctcgcaaggtctgaagtaccactctcaaatgttgctggtgctcccccaggctatgtgagtaaatcaagatgtcatcaatgaagacaataacaaaggaatcaatataaggcctaaacacccgattcatcagatccataaaagtcgctggggcattagtcaagacgaaggacatcactagaaactcataatggccatatctagtacggaaggccatcttcggaacatctaagtcccgaatcttcaactgatggtaccctgtcctcaagtcaattttagagaacaacctagcaccctgcaactggtcaaacaaatcatctttacgtgataacgggtacttgttcttgatgttaaccttgttcaactggcggtaatcaatgcacatccgtatagtcccatctttcttcttcacaaataacactggtacaccccaaggtgatacacttggtctcacaaacccctttactaacaactcctcaagctgttccttcaactccttctatattttcggagccatatggtacggttggatagatataggctgggtgcctagagccagatcaatacaaaaatcaatatcacgatctggcggtatgactggaaggttaaaaggaaacacatcagcgaactaccggactactggcactgaatcaattgtcggagaatctatggtggtgtcccaaacataaactagatacgccaaacacggcatcaatacatatgcaataactccccccttcaactccttctatatttttggagccatatggtatggttggatagatataggctgggtgcctagagccagatcaatacaaaaatctggcggtatgactggaaggttaaaaggaaacacatcggcgaactaccagactactggcactgaatcaatcgtcggagaatctatggtggtgtcccgaacataagctagatacaccaaacacggcatctgaggctaatgcatttggtctggacaaaaaagcatagaatcttgctggagcgccagcgggctggcctctgcctgactgaatagtagctgactagccttccccgacctggcctccacctctaggatggcccctgccagcctgccctccgcctctaggcggccggatagccggtgctgaaatcataggctgctgaccctgcaacactgccttgcctcaaagcctgggccagaatctcctcatctgacggaggtctctgcactcgaaacaacccctcggtgtgatgatcttctgtcctgatgtctgatcttgatggcttgtaggagcctgaatagccgatgggcggtattaactctcatgcatggtactaagataggagctggaagaaccctggagggctggtgggcggtaagaactctctggcgcggtgcggaaataggggcgcgctggagcaccttgaggaggtggtggtgatgaatatgggggcctgctaggctgacccctcccaaactaacctctgcccctagccggggaacctcttaactctctagagaaatgggccctcttgtcctgctgcatctgctctctccctttctaacggtagccctcaatcctccgagcaatctccactactagttgataaaaagtcaccatctcaacctctcggtgcatattggccataatactggagtgcatccctgcagctaaccttcgtactctctctgcgcccgtaggaagtatcataagtgcatggcgagacaactcagaaaacctcgccttagagtcggtcactaacatctgtccctgctcaagctgctcaaactgataccgcaactctcccctctacgagggtggaatatacctaaccaggaaaagctgtgtgaactggctccaagtcatgggaggagaaaccgctggtctgtcaaaaagataagactgccaccatctacgggccctgccctccagctggaaagtagtgaagtcaaccccatgagactccagtatcctcatattgtgcagtctgtccctgcacctatcaatgaaatcatgggcatcctcatggcgctcgcctccaaagacaggagggtgtagcctagttcatctgtccaataacttctgtggatcgtcgtccgcaacagatttaggctcaggtgccactgctgtaattggctgatacactgcagctgcatgtccaggagcctgagcagtaggggtctgtgttccccctcccgcctgagatgtggttgggtctacttgaaataaaccagcatgggtcatagaatccatgaaccacagcatacggcccatgatctcctgaaagcccagagctgccatgacatctaccggggctggctctgttgcgggcacctcaccctgctcctccactggttccgctggtggttctactaggaagctttgggacgccctcgtcccctacctcgagccaataccctccccggcctctagcaacgaagggagcagcccttcctgggtctggaacgtccgccacacacgtcctcactatctgtgagagaatagaagaaggaaatttagtataccatcaattgcagaggttaggcttggcagttactgggtaccgttgtggtttacttatactacgctcctgcacatcatttagtgcagatctaggtacttcctagcagcccagatatcagtgagctacctatgtacggagacttcgaggtatatctgccagtgtccgcaaactctagagtccacttctatccttattatgttgcttctttattttctttagactctgatatatagagaaattgaggaaaacgtcttagaagcttgtgacttattcctaccgggttttgggagttgtgataatgcgaatttgcagatttatataatttaaacttctattgttattccgcattgataggcttacctaatcttagagactaggtgccatcacgacatcccacaaagggaatttgggatcgcgacaagttggtatcagagctctagattcataggtgttatgagtcacaagcaggtttagtagagtctcgtggatcggtacggaggagcactgactccgcctctcgtaccccagagccacgggcccaagttgaccattcccaagaggttatacaagtgcagccagttgtcccagtttggcccgaggttagggcagcagtttcagagggggagcagctcaggctcgagaggtacaagaagtaccaccctcccacattcagcggtttagcttnnnnnnnnnnnnnnnnnnnnnnnnnnnnnnnnnnnnnnnnnnnnnnnnnnnnnnnnnnnnnnnnnnnnnnnnnnnnnnnnnnnnnnnnnnnnnnnnnnnnnnnnnnnnnnnnnnnnnnnnnnnnnnnnnnnnnnnnnnnnnnnnnnnnnnnnnnnnnnnnnnnnnnnnnnnnnnnnnnnnnnnnnnnnnnnnnnnnnnnnnnnnnnnnnnnnnnnnnnnnnnnnnnnnnnnnnnnnnnnnnnnnnnnnnnnnnnnnnnnnnnnnnnnnnnnnnnnnnnnnnnnnnnnnnnnnnnnnnnnnnnnnnnnnnnnnnnnnnnnnnnnnnnnnnnnnnnnnnnnnnnnnnnnnnnnnnnnnnnnnnnnnnnnnnnnnnnnnnnnnnnnnnnnnnnnnnnnnnnnnnnnnnnnnnnnnnnnnnnnnnnnnnnnnnnnnnnnnnnnnnnnnnnnnnnnnnnnnnnnnnnnnnnnnnnnnnnnnnnnnnnnnnnnnnnnnnnnnnnnnnnnnnnnnnnnnnnnnnnnnnnnnnnnnnnnnnnnnnnnnnnnnnnnnnnnnnnnnnnnnnnnnnnnnnnnnnnnnnnnnnnnnnnnnnnnnnnnnnnnnnnnnnnnnnnnnnnnnnnnnnnnnnnnnnnnnnnnnnnnnnnnnnnnnnnnnnnnnnnnnnnnnnnnnnnnnnnnnnnnnnnnnnnnnnnnnnnnnnnnnnnnnnnnnnnnnnnnnnnnnnnnnnnnnnnnnnnnnnnnnnnnnnnnnnnnnnnnnnnnnnnnnnnnnnnnnnnnnnnnnnnnnnnnnnnnnnnnnnnnnnnnnnnnnnnnnnnnnnnnnnnnnnnnnnnnnnnnnnnnnnnnnnnnnnnnnnnnnnnnnnnnnnnnnnnnnnnnnnnnnnnnnnnnnnnnnnnnnnnnnnnnnnnnnnnnnnnnnnnnnnnnnnnnnnnnnnnnnnnnnnnnnnnnnnnnnnnnnnnnnnnnnnnnnnnnnnnnnnnnnnnnnnnnnnnnnnnnnnnnnnnnnnnnnnnnnnnnnnnnnnnnnnnnnnnnnnnnnnnnnnnnnnnnnnnnnnnnnnnnnnnnnnnnnnnnnnnnnnnnnnnnnnnnnnnnnnnnnnnnnnnnnnnnnnnnnnnnnnnnnnnnnnnnnnnnnnnnnnnnnnnnnnnnnnnnnnnnnnnnnnnnnnnnnnnnnnnnnnnnnnnnnnnnnnnnnnnnnaaaaggatgctcagggttttcttgaggaatgtcattgtatcctctatactatgggtattgtggattccagtggggtttctttcacagcattccagcttagaggagtgcccaactagtggtggcggacatatgagttagatagtccgcatgagacaacttcactcacttggactcaattttaagatatgttattgagggaatatattcctctgagtcttagagatgcatggcgcacaaaagttgagcagctgcgccagagttctatgaccgtgtcagaatatgctgtttgattcagtgatttggctagatatgcagtagccttagttgctacttttcgagatcgggttcatcaatttattgaggggctccaccttagtaccagattcagtatggcctgagaaccggagatggacatcacataccaacatgtggcattgattacaaggagattggagggtatgcgaactcaggagagagaatagagggaagctaagagacctcgggattctggcacatataacagttctcgtgccctagctacagcccgtcatggtagaggctatatgagtcatcctattaattcagcacttccagcggtattccggctactcctagacctcaggttccatattatgcaccacaagtgtctactgtacctcttgtgcggggtgctttcagtcgacagtccagtcgatcaggcccgcgccagtcctagcagccacgtacttcgagggcttattttgagtgtggtgacactcgtcatatcatgaggtattgccccgaacttaggaggggtgcacctctacaaatttctcaagtcccacctattccatagggccctcaggcttcttaggccatgatcactgcagaagtttctactccacctgcacagccatctagaggtggtggtcagacaggtagaggtcgccgtagagggggaggccaggccagatattatgccctttctactaggacggaggcagttgcatccgattctgttatcataggtattattccggtcagtcatagagatgcatcagtcttatttgatccaggttccacttattcttatgtgtcatcttattttacctcgtatttgggagtatcccgtgactctttaagttcttctgtttatgtatctacacccgtgggtgaatctattattgttgatcgtgtgtatcgatcgtgtttgattgttatctaaggttttgagaccagagctgatttattattgctcagtatagtggatttcgatattattttaggcatgaactagttgtcgccctatcacgctatccttgattatcacaccaagacggtgacgttggctatgccaggtctaccatggctagagtggagaggtaccttggatcatgttcctagcagggttatttcatttcataaggctcgacgaatggttgataaagggtgtgatacgtatttggcctatgtgatagatgttagttttgatactcttaccgtggagtcagttcctgtagtaagagaattttctgatgtatttccagcgaatcttctgggtatgctacccgatagggatattgactttggcattgatttgttatcggggactcagcccatttctattccaccataccgtatggccctatcagaattaaaggaattaaaggagcagttacaggagatgcttgataagagttttgttcagcccagtgtatcgcctttgggagctcctgtcttatttgtgaagaagaaggatggttgtatgcggatgtatattgattaccgccagttgaacaaggttacagtgatgaatatgtatccattgccttgtattgatgacctattagatcagcctcagggtgctagagtgttctctaaggtcgactgcgttcaggctatcatcaattgaagattcgggagccagatatccctaagactgctttcaggactcggtatggtcattatgagttccttataatgtcatttgggctgaccaactccccagcaacatttatgaatttgatgaacagtttattccagtcctatcttgacttcttcttcattgtatttattgacgacattatggtgtactctcgaaccctggaggatcatgaacaatacctgaggactgtgcttcagactttgagagaaaagaagttgtatgtaaaattttcaaagtgtgaattctggcttgattcgataggaattttgggtcatgtggtaatgaacaaggggatccaagtagatccgaagaaaattgaagcagtacagagttggcccagaccgttatcagctactgagatccggagtttacttggcttggcgaggtattatcgtcgatttgtagagggtttctcttctattgctgcacctatgaacaaattgacccagaagggtgctccattcagatggaccgaggaatatgagaagatctttcaaaagctcaagagaactttgactacaacctcattattggtattacctacaggtttagggccttatactgtgtattatgatacgtcgcacattagtctcagcgtagtgttgatgcaagatggtagggtgattacctatgcatccagacagtttaaggtacatgagaagaattatctggtccatgaccttcagttagcagctattgttcatgccttgaagatttggcggcattatttgtacgaagtccattgtgatgtttacaccgatcaccatagtctacaacatctgtttaaacaaaaatatcttaacttacggtagaggaggtgattggagatgcttaaggattatgatatcaccattctctgtcatcctgggaaggccaatatagttaccgatgccttgagtcgtaaggcggagagtttgggtagcttagcatatttatcgacaatagagaagcctttagccttggatgttcaggctttggccaaacagtttgttagattggatgtttccgagccgtgccgagttttggcttgtatggtttcttagtcttctctttatgatcgtatcagacagtgtcagtaatatgtcccccatcttcttttccttaaggacacagttcagcacggtgatgccaaggaagtcactattggagatgacggtgtattacggaagtagggcaggctatgtgtgcccaatgtagatgatttgtgtgagttgattctccatgaggctcacagtttgtggtactccattcatccggattctacaaagatgtatcaggacttgagacaacactatcggtggaggcggataaagaaagacatagtggaatatgtaactcggtgcctaaattgccagtaggtgaagtgtgagcatcagcgaccgggtggattgcttcagaagttagagattccataatggaaatgggagcggatcactatggatttcgttgttgggctcccacggactcagagnnnnnnnnnnnnnnnnnnnnnnnnnnnnnnnnnnnnnnnnnnnnnnnnnnnnnnnnnnnnnnnnnnnnnnnnnnnnnnnnnnnnnnnnnnnnnnnnnnnnnnnnnnnnnnnnnnnnnnnnnnnnnnnnnnnnnnnnnnnnnnnnnnnnnnnnnnnnnnnnnnnnnnnnnnnnnnnnnnnnnnnnnnnnnnnnnnnnnnnnnnnnnnnnnnnnnnnnnnnnnnnnnnnnnnnnnnnnnnnnnnnnnnnnnnnnnnnnnnnnnnnnnnnnnnnnnnnnnnnnnnnnnnnnnnnnnnnnnnnnnnnnnnnnnnnnnnnnnnnnnnnnnnnnnnnnnnnnnnnnnnnnnnnnnnnnnnnnnnnnnnnnnnnnnnnnnnnnnnnnnnnnnnnnnnnnnnnnnnnnnnnnnnnnnnnnnnnnnnnnnnnnnnnnnnnnnnnnnnnnnnnnnnnnnnnnnnnnnnnnnnnnnnnnnnnnnnnnnnnnnnnnnnnnnnnnnnnnnnnnnnnnnnnnnnnnnnnnnnnnnnnnnnnnnnnnnnnnnnnnnnnnnnnnnnnnnnnnnnnnnnnnnnnnnnnnnnnnnnnnnnnnnnnnnnnnnnnnnnnnnnnnnnnnnnnnnnnnnnnnnnnnnnnnnnnnnnnnnnnnnnnnnnnnnnnnnnnnnnnnnnnnnnnnnnnnnnnnnnnnnnnnnnnnnnnnnnnnnnnnnnnnnnnnnnnnnnnnnnnnnnnnnnnnnnnnnnnnnnnnnnnnnnnnnnnnnnnnnnnnnnnnnnnnnnnnnnnnnnnnnnnnnnnnnnnnnnnnnnnnnnnnnnnnnnnnnnnnnnnnnnnnnnnnnnnnnnnnnnnnnnnnnnnnnnnnnnnnnnnnnnnnnnnnnnnnnnnnnnnnnnnnnnnnnnnnnnnnnnnnnnnnnnnnnnnnnnnnnnnnnnnnnnnnnnnnnnnnnnnnnnnnnnnnnnnnnnnnnnnnnnnnnnnnnnnnnnnnnnnnnnnnnnnnnnnnnnnnnnnnnnnnnnnnnnnnnnnnnnnnnnnnnnnnnnnnnnnnnnnnnnnnnnnnnnnnnnnnnnnnnnnnttagttcgatgcagtttgggtgattgtgaatagattgaccaagtcagcccatttcattcctgtggttactacttattcttcagagcagctggctcaagtttacattcgcgagattgttaggcttcatggagtaccggtatttatcatctctgaccatggtacacaacttacatcacgattctgcagagtcgtatagcgagagttgggtactcgggtagagttgagtacaacatttcaccctcaaacggacgggcagtccgagcactctattcagatattggaggatatgcttcatgcttgtgtgatagattttgggggtgcttgggatcagttcttgccacttgtggagtttgcttacaacaaaagttattagtcgagcattcagatggcggcgtacgaggccttatatggtaggcggtaccagtctgcagtgggttggttcaagataggaaaagctagactattgggtacggacttggttcaagatgctttggaaaaggttaaattgattcaggatcaaattcgtacaacccaatctagacaaaagagttatgtggatcgaaaggttcgtgatgttgcattcatggctggtgagtgggtcttgctccgggtttcgcccataaagggtgttatgagatttgggaaggaggtcaagttgagccctaggtatattaggccttttgagattcttgaaagaattggagaggtggcttatagacatgcactaccacctaatatctctacagttcatccagtgttccatgtttcaatgctccaaaaatatcacggtgatccatctcatgtgttagacttcagctcagtccagttggataaggatctatcttatgttgaagagccagtggccattttggacaaacatgttagagagctaagattgaagagcattgcttaagtaaaagtacagtggagaggtcatccggttgaggaggcgacttgggagaccgagcatgatatgcatagttgttatccttatcttttcaaaatccaggtataattctaaactcattcgaagatgagtgtttgtataagagggttaaatgtaacgactcggccagtcgttttgagtattacaacaccgttcccctattcattgctcaatttatgctttacaatttttatgtgacttgccggggtgattagttcgggtccgatgaggttttggaatgaattggaacatttgttccaaggtttaaagtttaagttgaaatagtgaccggatgtcgacttatgtgtaaacgacaccacaatagagttttgatgattccaatagctctgtatggtgattttagtcttaggagcctgtccgaaattttattttgaagtccgtaatggaatttggcttgaaatggcgaaaattgaatttttgtgaagtttgaccggggagttgactttttgatatcggggtcgaaatccagttctgaaattttttatatctccgttatgttatttattacttgtgtgcaaaatttgaggtcaatcagacttgatttgataggtttcggcatcgaatgtagaagttggaaattcttaagttacttaagcttgaatttaggtatgattcgtggttttagtgttgttttatgtgatttgagatttcaactaagtttgtatgatattttatgacttgttggtatatttggttgaggtcccgagggccttgggtgagtttcagatggttaacagatcacttttggactttgcattccagctaaagaatgctggttttttgtcactgatttccttccacgcgatcgcatactaagttggagcagtgaaattttgtgctatgcaatcacgttaaggcatccgcgattgcgtaggtttggccaggttgtgctacaaacgcgtgggaaatgtcgtgttcgcgaagaggaatgaggcagaaggctgggtcacacgtttgctctatgtgatcgcatgtggttgtccgcgatcacgtagggatgaagatcctgtgcttcacgatcgcgtgaaggacaccgcgatcgcgtatgatcttttctgggcagcttgcaattgcacttcgcgatcgcgggaccttttctgtgatcgcatataagaaatgactgggcagaatgtttaagttctgaaaaccatttttaccgatttggagctcggggaaaggcgatttttgggagtgtttcaaggaaaacatcggggtaagtgttcttaactcaattttggttaaagtacccaaatctatggtagtttttaacatttaattggtggattaatttggaaaaattgtgaaaatccctaagtttagatggaagatttgagggtcgagttgatgtcggaatttaatgattttggtatggttggactcgtggttaaatgggcgttcatattttgtaacttttgtcaggttccgagatgtgggccccacgggcaatttttgggttaaatttctgattttgttagaaaatttgtattttcatatggaatttattcctataatttatatttattgaatcgaattaattatgactagattcgacccgatcggagtcggaaaatcgagaaaaaggcatactacttgactgattgagcgtggcttgagataagtgacttgtctaactttgtgtgggggaaatttcccttaggattggtattgataagaaaatgttgatatgttggaagtcgtacatgaggtgacgagtgtgtacatgcgctaaatctggaagattatgtctttaaattttgtagagaattgttgcatattaattaaattattttattttgttatatttatcatcattaatatattttcgtatttaaaattggcatgatctgttcctggtaagtgttttacctatttagtagaaactcagtttcttttgttctgtgcattatttgaaggatgtgtttattaatttaaatattattaaaaatgaagtagtttacatttaaaaatttgatatttagacaaggtgttaaatttgtgaaaatattatttttgctgaatattttgtgagattttcctactcattgtgattgagccgtgagatccttattatgaaaaatattgttgttgatttatattggcatgagccatgagctctttattgtggaaaatattgttgtggttgatttattttggcaagttgaaatatttatgcacttgaggtacaaattgtgatatattgtgatattgatacgcatgtggtggtgtaaggtctgggtgttgaaatgcatgcggtgagataagggtggcttgatatgcgtggctagtaagggaactactagaagtcatgtggtgtgataagggtgtctaaaacgcgggatgctatttcgggaaaaatattttctttaaaaaaaataaaatgtgaaggctcccgcggtgatataagaaaatgagatattgtgaatttatttatgatttgggactacaatgcggtacctcgggagtgcccttgttgatatttgtttatggctgcatttgccattgattattatttttccttattctgtgaagttaaatggtgacatactacttacttgattcattttgtaatgacccagccggtcgttttgagcatttgcacttcagtcggtagtttacgggcgtgagtagctccatatgatgtattttgacttattcggtatttatttggaagaatgattatcaactagggagctttaaatttgaaagagtttgacttttagcatttgacctcggattagaattttgatggttccattagctccgttgggtgattttggactttggagcgcgtccggattgtgatttggaggtccgtggttgaatttggatcgaaatggcgaaagttgaaattttgaaaagtttaaccgggagtggactttttgatattgaggtcggattccgattccggttgaggtgagattcgtcgcatcgatgttgttatatgtgttttgaggcctcgagtaggtctatgttatgttatgggacttgttggtatgttaggacggggtcccgagggtctcgggcgtgttttggattgatttcggatcattttccttcatgttgcactgctggtttctggtgtcttagtcctttatcgcgctcgcggggcaattgtcgcgaacgcgtagtgtattccgagggcagcagcaaattgttctttgcgatcgcgaagtatgtcccatgttcgcgtagagttagggcaagtcttcttagcgttcacatatggaggatcgcattcacatagtgatgaggttggcagctaggagttggagcattcttctatgcgatcgcggaaggtgagtcgcgttcgcgaagccttggtaacaatagtcatcgcgtttgcgtgggatgtatcgcgaacgcgtagagtgttttatggcagtgtgggttttattcatcacgagcgcgatacatttcccgcgttcgcgaaagtttgggggggtgggcagattataaagtactctatttcgagggtttcgaccatttttacattttgggagctatggagctcggattgaggcgattcttgaagcaattttcnnnnnnnnnnnnnnnnnnnnnnnnnnnnnnnnnnnnnnnnnnnnnnnnnnnnnnnnnnnnnnnnnnnnnnnnnnnnnnnnnnnnnnnnnnnnnnnnnnnnnnnnnnnnnnnnnnnnnnnnnnnnnnnnnnnnnnnnnnnnnnnnnnnnnnnnnnnnnnnnnnnnnnnnnnnnnnnnnnnnnnnnnnnnnnnnnnnnnnnnnnnnnnnnnnnnnnnnnnnnnnnnnnnnnnnnnnnnnnnnnnnnnnnnnnnnnnnnnnnnnnnnnnnnnnnnnnnnnnnnnnnnnnnnnnnnnnnnnnnnnnnnnnnnnnnnnnnnnnnnnnnnnnnnnnnnnnnnnnnnnnnnnnnnnnnnnnnnnnnnnnnnnnnnnnnnnnnnnnnnnnnnnnnnnnnnnnnnnnnnnnnnnnnnnnnnnnnnnnnnnnnnnnnnnnnnnnnnnnnnnnnnnnnnnnnnnnnnnnnnnnnnnnnnnnnnnnnnnnnnnnnnnnnnnnnnnnnnnnnnnnnnnnnnnnnnnnnnnnnnnnnnnnnnnnnnnnnnnnnnnnnnnnnnnnnnnnnnnnnnnnnnnnnnnnnnnnnnnnnnnnnnnnnnnnnnnnnnnnnnnnnnnnnnnnnnnnnnnnnnnnnnnnnnnnnnnnnnnnnnnnnnnnnnnnnnnnnnnnnnnnnnnnnnnnnnnnnnnnnnnnnnnnnnnnnnnnnnnnnnnnnnnnnnnnnnnnnnnnnnnnnnnnnnnnnnnnnnnnnnnnnnnnnnnnnnnnnnnnnnnnnnnnnnnnnnnnnnnnnnnnnnnnnnnnnnnnnnnnnnnnnnnnnnnnnnnnnnnnnnnnnnnnnnnnnnnnnnnnnnnnnnnnnnnnnnnnnnnnnnnnnnnnnnnnnnnnnnnnnnnnnnnnnnnnnnnnnnnnnnnnnnnnnnnnnnnnnnnnnnnnnnnnnnnnnnnnnnnnnnnnnnnnnnnnnnnnnnnnnnnnnnnnnnnnnnnnnnnnnnnnnnnnnnnnnnnnnnnnnnnnnnnnnnnnnnnnnnnnnnnnnnnnnnnnnnnnnnnnnnnnnnnnnnnnnnnnnnnnnnnnnnnnnnnnnnnnnnnnnnnnnnnnnnnnnnnnnnnnnnnnnnnnnnnnnnnnnnnnnnnnnnnnnnnnnnnnnnnnnnnnnnnnnnnnnnnnnnnnnnnnnnnnnnnnnnnnnnnnnnnnnnnnnnnnnnnnnnnnnnnntgttatatttcatgaatctatcttcgtttttggtcattggattgtgaattttaaagaggaaattgggggttttggcctaaatcttcataatatgaatttttgagttttgaacatctagttggtgtcggatttgagtgaaactagtatggttggactcataattgaatgagttgttggattttgtaaattttgtcgggttccaaggtgcgggcctgggttgggcttttggccaattttgggcttttcaaatatttgatctttttcgatcgggattggttcctttagcattgtttgatgtacttgagtcatgtttttgttagtttcgagccgttcagaggtaggaacgcgcgtgatggcatctttggagcatcggttggcttgctcgatattggtattggcttgatcgagataagtaactcttctaatcttggagttgagggtatgaaaccttgaaatacgtgttatgtgacttgtgttgaggtgacgcacatgctaggtgacaggcatgtgggcgtgcaccatgtgaattgggactctgttgtttccatggcactgtatagtggtcctactttgttaatgtccgtgttttcaccatgcaataaagtaattgagttgtcactcgtgctagataccatgtttaggctttatgatgatactggtaggacccatagtggtagtttcttgatgttatttcactagtttcattgatattttgtactcagtcatattcatgcattcatatcatatctcagtctcattaatttttgatacatcatatcattgttgtcgagctagtttcatggcattgtgagcccgtgagtgagactggagagtgatgactgagtgaggccgagggcctgagtgagattgataatttgggatcgggctacatgctgcagcatgttatattgatattttgggatcgggatgcacgccgcaacaggttatatggattatattttatgggatcgagctgcacgccgcaacgatatagcgcttgggctgaagggagcccttccggagtttgcaaacctctagtgagcatagtcgactataaatatggatcgggctgcatgccgcagcgggtatggtacaacgctgagtgattgagtgtgctgagcatagtgagagagaatgcaaggcagtgtgattgagtactcggagagtgtgagtacatgagctcatcatcgagatgcatagcatttgacatgcgtacttgagatacatgcatagaggtgcatttcgttctgctacccagttttggggacattcatgattttacctatatcttaacatgaaggcatagagaagtactttcctcatgctatctgaaaatgaaacatcttactatttgttgaaagcagttttgaaaaaaaaatcacagttttcaaacttactcgcactttggctttttctataaaagatttgggttttcactgagatacttgaaaagaaatgcctattatttccgagatacttttttgttattgtactatgctgttatgaacttatatggaatattggtgttgtacccgtccaatttttttattagctcgtcactacttttaacctaaggttaggtttgttacttattgagtacatggggtcgattgtactcatactacacttctacaccttgcgtgcagatattgactgctgatgttgttgtgttcgatgggagctggatttgaagaagtgcctgcgtcctggttgtagctgcctcttattcgtggtagccttaaacctataaaactcggttaatgtacttttcaaacagacgatgtaattacttcatttcagtttgtaaactctattcttagaagctcatgatttgtactaccagttcttggagaatgtatcagattcagataatttctttacttaattgctttattgaatgctattggaattggttaggggttaactggcttacctagcgggttgggttcggtgccatcccgactaattggattttgggtcgtgacaaggtggtatcagagctctaggttcataggttctacaagtaatgagaaagtgtctagtagagtcttgtggaccggtatgatgacgtccatacctatctttgagaggctacaaggcatttaggatatacttcccatatttatttccttatcatgctacattgattcagcttgaagcgtaactctttgaattccttccacacctccgtgtgcgcatgtgagcgttcgatatcggttgtgcaccagcgacttatgattccatggttgaggtgcgagatgtgattttgacgtgctgatgatgggctagtctggaggacttgaggccgggttttgaccgtagctggagcacgaagattttgattgtatgagaatgtgcttttgggacttacagattcattggtgtccctattagaggaatttatgattggatgactatgtggtgagtatgatgagactatgagatgtgtttagattgttcgaatgtgacgagaagagtttacttgagatgtagcaaggattatggggtgtttgatttctgtcttgatttggcgtatggtcccgagttatgcgtgtatttagggatctctcatgttgtttagttgtggagtgaagtagattatcatgtcttgttgatgagttcagaatcgagaaaattaagtgatcgcatagtagtcgtgactgggaaagggtgtagagagatgtcagtttgaggcaaggcaggtgggttattccctacgaggtgtcctgaggttgagtgacccctatgatgttttctagagagttttcttttaccagtgaatgatatatgttgcaatttgagtttggatcgcttgtggaagttggcttaaccatcacgaggatgaacgcgagatttannnnnnnnnnnnnnnnnnnnnnnnnnnnnnnnnnnnnnnnnnnnnnnnnnnnnnnnnnnnnnnnnnnnnnnnnnnnnnnnnnnnnnnnnnnnnnnnnnnnnnnnnnnnnnnnnnnnnnnnnnnnnnnnnnnnnnnnnnnnnnnnnnnnnnnnnnnnnnnnnnnnnnnnnnnnnnnnnnnnnnnnnnnnnnnnnnnnnnnnnnnnnnnnnnnnnnnnnnnnnnnnnnnnnnnnnnnnnnnnnnnnnnnnnnnnnnnnnnnnnnnnnnnnnnnnnnnnnnnnnnnnnnnnnnnnnnnnnnnnnnnnnnnnnnnnnnnnnnnnnnnnnnnnnnnnnnnnnnnnnnnnnnnnnnnnnnnnnnnnnnnnnnnnnnnnnnnnnnnnnnnnnnnnnnnnnnnnnnnnnnnnnnnnnnnnnnnnnnnnnnnnnnnnnnnnnnnnnnnnnnnnnnnnnnnnnnnnnnnnnnnnnnnnnnnnnnnnnnnnnnnnnnnnnnnnnnnnnnnnnnnnnnnnnnnnnnnnnnnnnnnnnnnnnnnnnnnnnnnnnnnnnnnnnnnnnnnnnnnnnnnnnnnnnnnnnnnnnnnnnnnnnnnnnnnnnnnnnnnnnnnnnnnnnnnnnnnnnnnnnnnnnnnncagatgatttaaggtactagatagtttgtgttgcacgagcggatgaagggtttagtggaatctcactgtggtattatggtagtaatggctatggctattgtaagtaatcagatattttactccatgggtttgagccaagtgggggagtctgctatcaacgagttgattatacggttatgtgttgtattggattcggtttgaggtatactgatgaatcaattatgactcgcagaagttgatattgaggatgactcgagtaagggaatttctggataaaggttgtattgcactctatgggtatatgggaatcataaaataattgagtggttattcgcgaaggatgtagtgtacatggagtaggaatttgctcgattgcttaggagtgtgagttactcccttgggtgttggtgtgctaatggggcacaggtcatttggtccgtttggttggttaattgagatttgagtagagtggatgactctcgagaatggttctaatggattcaagaattaaatgtagcaattaagaatttcggattggtatatggctaggatctgatatttgcattggatggtgtcaatacttgtgtcatttttatatcattatggattctgcatttcagtatcaagaaggtgaaggaaacagttttaggttcacatagggtctctttacagtgggtgtctcggatgtggtgctttagggtgcttaagagggaagtcagtggcttatgggccttagggaattgtggttttgtactagtgtctcttgtgtggtgaattttggttacgaatcatggtgttccagcaaggagaagtatcaatttgaaggcaacttggaagggacttggagaaatagaacagtgtggtagtaggtttgatcagcatagtgatggatataatcggttctttgggtacttatgatgtggctagcctccacaggtgtttcgtggcaatgctattgggttttggcaatctgcgtggctgggtgagttatagagattcaattctgatatcttggttgtgtgcaaatgggcttcgaagagttctcaatggttttttccatggttcgaggagtatatttcctaccagcgtgaggaatatgttgcgtattgggattttctcctgtatgagatcaaattgaagctttctgactgatcgggtatgtattctgctggtgactcataatgattatgaggttctcgtatttttcatataatggcatgattgatgtggtgtgttgtgtgggactgagatttgcatgtgtagggttacaattcagtagtaaaaggggaggacataaattcgtaggcaacattgacggttttagatgactaggtaaatgatattactaatcgatatggcctgatgagagtatacatttcagaaggggcaatgtgttttgatttatggatactttattggtattgcggtactctcctagttgatcggctgctgatattcaaatttttctatgtcgaacgggagaattttagaagtatttctcatgggattatcgtgtatgagagatgtgttagacattttggcggtggaggttggatcagatatgctgattcgtgtgttctatggatttggagactggagttctcaagagcaggttgtttcatgtttgtggattatgaagtcctggccgaagctagctagacgatgatatatgttatgattcagtcattttgggttttcggagggttatttatctctttgtgggtggtcggagttgatttgggggtccnnnnnnnnnnnnnnnnnnnnnnnnnnnnnnnnnnnnnnnnnnnnnnnnnnnnnnnnnnnnnnnnnnnnnnnnnnnnnnnnnnnnnnnnnnnnnnnnnnnnnnnnnnnnnnnnnnnnnnnnnnnnnnnnnnnnnnnnnnnnnnnnnnnnnnnnnnnnnnnnnnnnnnnnnnnnnnnnnnnnnnnnnnnnnnnnnnnnnnnnnnnnnnnnnnnnnnnnnnnnnnnnnnnnnnnnnnnnnnnnnnnnnnnnnnnnnnnnnnnnnnnnnnnnnnnnnnnnnnnnnnnnnnnnnnnnnnnnnnnnnnnnnnnnnnnnnnnnnnnnnnnnnnnnnnnnnnnnnnnnnnnnnnnnnnnnnnnnnnnnnnnnnnnnnnnnnnnnnnnnnnnnnnnnnnnnnnnnnnnnnnnnnnnnnnnnnnnnnnnnnnnnnnnnnnnnnnnnnnnnnnnnnnnnnnnnnnnnnnnnnnnnnnnnnnnnnnnnnnnnnnnnnnnnnnnnnnnnnnnnnnnnnnnnnnnnnnnnnnnnnnnnnnnnnnnnnnnnnnnnnnnnnnnnnnnnnnnnnnnnnnnnnnnnnnnnnnnnnnnnnnnnnnnnnnnnnnnnnnnnnnnnnnnnnnnnnnnnnnnnnnnnnnnnnnnnnnnnnnnnnnnnnnnnnnnnnnnnnnnnnnnnnnnnnnnnnnnnnnnnnnnnnnnnnnnnnnnnnnnnnnnnnnnnnnnnnnnnnnnnnnnnnnnnnnnnnnnnnnnnnnnnnnnnnnnnnnnnnnnnnnnnnnnnnnnnnnnnnnnnnnnnnnnnnnnnnnnnnnnnnnnnnnnnnnnnnnnnnnnnnnnnnnnnnnnnnnnnnnnnnnnnnnnnnnnnnnnnnnnnnnnnnnnnnnnnnnnnnnnnnnnnnnnnnnnnnnnnnnnnnnnnnnnnnnnnnnnnnnnnnnnnnnnnnnnnnnnnnnnnnnnnnnnnnnnnnnnnnnnnnnnnnnnnnnnnnnnnnnnnnnnnnnnnnnnnnnnnnnnnnnnnnnnnnnnnnnnnnnnnnnnnnnnnnnnnnnnnnnnnnnnnnnnnnnnnnnnnnnnnnnnnnnnnnnnnnnnnnnnnnnnnnnnnnnnnnnnnnnnnnnnnnnnnnnnnnnnnnggcctaattaggatgtgcattatacaccgagccggattggttagctccatacttctactgttgagggatgtgtcattcggttgttgttgagctcattcatgttctaaaatgatctgtgagattcttttctatgctacgaggagttgtgattcattggttataagcacacctggtgcggttctctttgggccttatagcggaatttctacgagatgggtatttgggtgatgcatgagtggttgcacattggttatgttctttcgggtttgtgtggcattgtgtcatttgcttctccatggttatggtaatgcactttaagtacttgatgtcatattgcgcgtggttattgattttgagcatggtggctgaggtgtttcatatgaatcagtgtttggatggggtcacgcgttgcaatagagttatgttaagatccgatcctttgtgttagattcgtgtgtattggttctactaggtatgatgggttcatagcatttcggctgtggtagtacttgttgaacttgcgggatggttctctcgtttgagtcatttttccatgatttgagtatattcggaatattgcttattggtgcacgaattgcacgagctatggctttagattgtattgatgggtcatgtcactagagtggtcgtgttggatgagatgaggtcactggacctagaatggatactatcgaaattgattacagcatggttggaaggataatatcgaaagtcggcttagaaatttgctatagttcttgtcaaaggagagggagttccatgactggtggatctgatgaatggtaacgactttctgtgtgtttcttttatcatcgacagtgtacgaaggttttagaatgaagtcttgtttgatatgaggtttaatacaggcattgggttgttttgagcagctattgtggttagaaatcattgctttgagcttttgagctatgtgttatttgagttttatgagtatttgagttatggttatggcttctggttcaacttgttcagacttatatagtatgtagatgtgaaattctgatcttataagaaattccggatgttggaaattggattcgaaggcttgtgggctaggttgaattgagaaattttagttatgttgtgttattagaactttatgggatagggtgacgtgggatcacccccgggtatatgcatggtaaggttatacggcggtttgatggctttgagaacaactttggacacgtttgaggacgaacgtatgtttaagtgggggaggatgtaacgacccgaccgatcattttgagcatttgcacttcgttcgatagtttacgggcatgagtagctccgtatgatgtcttttgacttgtgtgaatcgccgattttggttttcaggttattcggtactgatttggaagaatgattctcaactagggaacgttaaatttgaaagagttaaccaagtttgacttttagcatttgacctcggattgaaattttgatggttttgttagctccgttaggtgattttggactttggagcgcgtccagattgtgatttggaggtccgtggatgaatttggatcgaaatggcaaaagttaaaattttggaaattttaaccgggagtggactttttgatatcggggtccaattccgattcctgaagttggagcaggtccgtaatatcaaatgtgacttctgtgcaaaaattgatgtcaatcggacatgatttgataggtttcagcattggttgtggaagtttgaagtttcaaagtttattgatttcgagttgaggtatgattcgtcatttcgatgttgttatgtgtattttgaggcctcgagtaggtctgtgttatgttatgggacatgttggtatgttaggacggggtcctgagtggctcgggcgtgtttcagattgatttcagatcattttccttcatgtttttactgttgtgttctgctggtttctggtgtctcagtccttcatcacgttcgcggggcaattgtcgcaaacgcgtagtgtattccgagggaagtaggtaaattgtatcgcgaagtatgtcccgcgttcgcgcaaagttgtggcaagtcttcttcgcagtcgcgtatggatgatcgcgttcgcgtagcgataaggttggcacctgggagttggagcattcttctatgcgatcgtagaatgtgagtcgcatttacgaaaccttggtagaagtggtcattgcgttcgcgcggggtgtatcacgaacgcatagagtcttttgtggcagtgtgagttttattcatcgcgaacgcgatgaatttcccgcgttcgtgaaagagggggcctgggcagattataaagtattctatttcgagggtttcaaccatttttacattttgggagctatggagctcggattgacggatcgaatttggatttggaggaggagctgaagcagctgggctgctggagagatcgcacctgcgcgaaaaattgacgcaggtgcgagctcgcggatgcgaggaattagccgcggaaacggaaaatgcatgggctggccaggcaccgcgggtgcgaaaaatgttgccgcgaatcatcgcgggtgcgaagaccgcaggcgcgaagaaatcaccgcgggtgcgaagaaatcaccgcggatgcgaaaatcctggacagaatgttaaaaacagagggggttctgagttttgctatttttcgaccttcaagcacagtttttgcggcgattttgagagaattcaaggaaaacttgaggtaagtcacttgtgattatttctactctataatattgaattatcatcgaataatccgactagattacatgtttttaaggtgtaaatcggggttttgaacttagggatttaaaaataagatttgaagatttggaggtcgagttgaggtcggattttggtaaaattagtatggttagactcgtggttgaatgggcttccggattttataacttttatcgaattccgagacgtgggccccataagtgattttggggcgtaatttcggatttttagaaaatattagtattttgatatggaattaattcctataatttttgtgggctgaatcaaattaattgtgactagattcgnnnnnnnnnnnnnnnnnnnnnnnnnnnnnnnnnnnnnnnnnnnnnnnnnnnnnnnnnnnnnnnnnnnnnnnnnnnnnnnnnnnnnnnnnnnnnnnnnnnnnnnnnnnnnnnnnnnnnnnnnnnnnnnnnnnnnnnnnnnnttggatttttgcttgttcgaggtaagtaactcttctaatcttggagctgatggtatgaaccctgaatatatatgtatttcgtgaattgttgtgaggtgacgcacatactaggtgacgggcgtgtcggcatgcactatagaaattatgacataattgtttctgtgaaattgtgtagtaaataatcttggcattttccatgtggtttatgtgttaatgaaattgagctgaaaagtatattaaaaatcatgttgaggctatgtgccagtattattgggacctacggaggtcatattgctgtgaattatttgttttaaattgaaaattcatactcagacatattcatttcattacatataatatataagtctctgttgttatttattgattcatcatatcattattttcgggctatttttgtgacattgtgtccgagagactggagagattgatgactgagtgaggccgaggccctgattgtaaggataattatgggatcgggttgcacgctgcagcatgccatattggcttttttatggcacgtgagttgtccgtgcggattctgatatgatattatagcacgtgagttgtccgtgcagcacatgagttatctgtacagattatagcacttgggttgtaggagcccctccggatctgtacaaacccccagtgagcgcaggtacttactgagtgcgagtgccgagttctgagtgactgtgaggcatgagtgattgtgaggtatctccgagtggcaagagtgattgtgaggtatgcccgagtggaatgagtgtttgtgaggtttgtccgaggggctgtatatgagtgatgttctgcccgaggggctgtttatgattttaccactgagttgcatcgcattggcatgcacacatgacatacatgcatagagatgtatttcctcatgttgtactgcaccacatcattcatgattttgcacacattttttacagatgggcatagtgatgcatttgttttacacgggttatccggaaggaaaatgaaacatcttatttattattgaaaatattttgggagaaatttattgttttcaaactattcatatttttggcaacttcggtaaacgatttgggtttttactgatgtatttgaaaggaagaaaactattatttttgaaattatgatttggttgagcattttatctctgagttacttctggtattattttccttatgttgttatggactgttgtggactattggttgtggaccgaccttggtagaagcttgtcactactttcaaccaaaggctaggtttgttacttactcagtacatggggtcggttgtactgatactatatttctgcacattgcgtgcagatgtcggctgttgttgttgctctgctcgatggttgcgggatttgaagatgtatctgtgttcctgttgtagatgcctcttgttcatggtagccttagatttataaaagctctgtttatgtattattcaaacagactatgtatttatttcatttccgctttgtatactctattcttagaagctcatgatttgtactaccagttcttgggggatgtataagactaagatctttattcacttaaattgctttaataattattattggagttcgataattgaaagttggcttacctagcgggttgggttaggtgccatcacgactagttggattttgggtcgtgacaaggtggtatcagagctctaggttcataagttctacaagtcatgagcaagtgtctagtagagtcttgcggatcggtatgatgacgtccatacttaccttcgagaggctacagggcatttaggacatatacttcccatctttctttcattatcgtgcaagattgattcagctttagacataaactctttgaattccttctatgtattcgtatgcacacatgagcgcttggtatcagttgtgcatcgccggcttgtgatttcatgaatgaaattcgagatgagtattctatgttttggtgaaggtccagtctggaggacttgaggccaggtttagaccgcagcttaagctcggtagctttagttgtaacttgtacaattggactcatatgtccggtgatgaccctacagtggaatttgtggctcgatgagcggtgaaatggcggcatgatgggtatgatgtgaccgcgggatgtgttaagacaatttgaacataacgagaagtgtttaattgaaatgtaaagggaaggccatatggtgcttcatttttgatttgatgtgacgtacaatctcgagtgtgaattttttgaaggatctttcacgattgttaaattttgggacaaattaaactctcaggtctggttaacgagtttggactcagaaagatttagtgattgcatagaaattgtggctgcgaaaagatataacaagatgccagtttcaggctagggaggtgggttatctcctggagagtaatctacgtaggtgtgttccttgtaatgtgaatggaggctttcttttttgccagtggggcgtatgtgtggagatttgcatttgaatctggctgagaaagtcgacttaagtgtcaagggaataattgcgggcttagcggatgatttggggtatttttgtggttggtgttgtatgagcttgagaagaattttgtggcactgactacgatattatgacattaatagggtatgggtattgccaattatggagtggtttaatctatggctttgagccaagtgggggagcctgctattgacaatttgatttcactgttatgtgttaacttgtagttttgggctgaggcatactggtgggatagttatgacttgcagaagttaagatcgaggatgactcgggtaaggaaatttctgaatacggattatgttgcactttatgagtaaacatcatgggacgcatggagtatgaatttgattgggggtattaaagtagagttacttctttgagtgttgttgtgctaatggggcacgtgtcttttggcccatttgggnnnnnnnnnnnnnnnnnnnnnnnnnnnnnnnnnnnnnnnnnnnnnnnnnnnnntggtgcaatttagatttgagcaaagtgggtgacttccgagaaaattctagtgggtttgagaatttgtttatagcaattgagaatatctccggacttgtgtatagataaaacctgagatttgcatttgatggttcctggacttgtggaaattctatatgacaatggattctacattttagtataagtgagtattatagttgtggtatttttgaaagtgcttaagaagaatacagttgcttatgggtcgtagggcgttgtggttctatgctaaggtttgtagggtgagttgcggttaaagatcgtggtattttagcaagaagaagtatcaatctgaagacaaattcgaaagggactcggagaaaataggacaactgggtagtaggttggatcagtatggtaatggatatgatcggttctttgggtgcttatgatgtgggggttttctacaggtgctttgtggcaatacacctggacttggcgacctgcgtggcttggtcgagttagaggaatttagttttaagggcttgattatgtgcaaatggattccaaagtattcttgatggtttctaccggtgtggagaacgtgttgtgtattgtgatttcctcctggaaagaagcaagagaaaggtttctaactaaaatggtatgtaaattattggtgactcaaagttgataataagattcttgtgcttttcacatgatggcaagatagatgttatgtgttgtacgaaagctagattttcatgtacaaggtggcagtacagtcttgaagagaaggtaacgaatgttggacaacatggactgtttcaaataactagatgaatactattactacttggtgttgtatgagaaaggagcggacttcagaaggcgcattgtattttgagttacagatgtataaattagtattgcggtactcacatggttgatagactactgatattcaaatttttgtcaagtggcacggaagatcttttaacgtatttctcgtgggatgattgtgtatgagaggggtgttaggcattcaggcgatggagatggaatcaaatatggtgattcgcgtgttctacggatttggagattaggagttcctaagagcagattatttcatggttgtggactgtgaagttgtggccggagctagccagatgataaaatgtgttatgattcagtcattatggattttctgagggattgttatctatttttgggtaacccgagttgatttgggggtccataggtaggcccaattaagatgtgtattctacaccggccagaatggttggctccatgctgctattattgagggatgtgtcattcagttgatgttgaatttattcgtattctcaaatgatctgtgagttactcctttatgctacaaggagttgtgattcattggttatgtgcatagattgtgcaattctatttgagctttatagcggaatttgagtgtgatgagtatttgggtattgcatgatcgatagcgtaatggttatgtcctttcaggttttgtgtggtatttttgtcattttcctctccgtcgttattaatttggatcaggttagcttggggtatataatatgaacctcgtgttagaatcgggtgatggttctacggtgtatgatgaattttctgcatttcgttgtgctggtacttgttaatctggcggggcagttctctcatttgagtcattttccatgactgggtacatttgaatgttgcgtattggttcacggatggcacgggttgtggctccgagttatattggtgcagtatgtctatggaacagttatgtttagtaatataaggtcattggacctggaatgggtactattaggtttaatttcggtatatttgggagtataatattgaaagtcggctcagaaagtgattatggttctggttggggcgagagatatccatgtcttgttgatctgataaggggttacgagattctgcgtgtttcttttattattaacagtgtacgaaggtgtggggatgaggttttgttcgatatggggtttgatgctagtatttggttggtttgaagtagtaactgtgatcatgaatggtgctacgggcgggcgagttgtctaatattctggataaattatatccgtgattatagttttggatctatgtagcttattcagactcatacatcgtgtaaatgtaagattcgtgtcttgaaaagaaattctgaaagttgggatttgaattccaaggtttttgggctaaggttaaattaaggattttcagttgtattgtgttgttaagctcatatggaaaagggtgtcgtggatttacccccgggtacgtgcgtgataagatggaatagtgatttggtggcttgaaaacaactcatggcacgttcgaggacgaacgtatatttaagtgggggagattgtaacgaccccgacggttgttttgggtatttacgctcctttcaactaattaaagttttgaataactttatacgaggtattatgacttgtgtgaattattgattttggttttaaggtatttcggagttagcttggaaggatgaattttcatgttggaagcttaagttgaaatagttgatcagatattgacttatgagtaaacgacctcggaatttaatttgatgattccaatagctccgtatggtgatttcagacttaggagcatgtccgaaaaattatttggaagtccgtagtggaattaggcttgaaatgccgaaaatttaattttgggaagtttgactggcgggttgactttttgatagtgaggatgaaatctgattctggaaatttgaatagcttcgttatgtcatttatgacttgtgtgcaaaatttgaagtcattccggattgatttgatatgtttcggcacaagatatagaatttgatagttcaaagttcatagattttgatttgaggtacgattcgtcgttttgatgttttttgatatgatttgaggcctcgagtaggtccgtgttatgttatggaacttgttggtatgttcggacgtggtcccgaggacctcgggtgtgtatcggatgcttaaccgatcgaatttggatttggaagaagagctgaagcagctgggctgctggtgtgatcacacctgcgcgaaaaagggccgcaggtacgagctcacagatgtgaggaattagtcgcggaagcggaaaatgcatgggctggccaggcaccgcgggtgcaaaaaattttgccgcgggtgcgaagactgcaggcgcgaagaaatcatcaccggtgcgatgaccgcatgtgcgaagaaatcatcgccggtgcgaagaccgcaggcgcgaagaaatcaccgcgggtgcgaagaccgcaggtgcgaagaaatcactgcggacgcgaaaatcctggacagaatgttaaaaacagagggggttccgagttttgccatttttggaccttcaagcacggtttttggggtgattttgagagagaattcaagggaaagttgaggtaagtcacttgtgatcatgtctactccataatattgaattattatcgaataatccgactagattacatgtttttgaggtgtaaatcgggtgtttgaacttagggttttgaaaataagatttgaagatttggaggtcgagttgaggtcggattttggtaaacttagtatggttagaatcatggttgaatgggcttccggattttataacttttatcggattttggggcgtaatttctgatttttggaaaatattagtattttgatatggaattaattcctataatttttgtgggctgaataaaataaattgtgactagattcgagccgtttggaagttgatacgcgcagaatggaatttctggagcattgcttttcttgctcgacatttgatttttgcttgtttgaggtaagtaactcttctaatcttggagctgagggtatgaaccctgaatatatgtttttcgtgacttgttgagaggtgacgcgcatgctaggtgacgggcctgtgggcgagcaccatgtgaattgggactgtgttgtttctatggcactgtatagtggtcctaatttgttaatgttcgtgttttcactgtgtgataaagtaattaagctgtaaatcatgctatataccatgtttaggctttatgacgatattgctaggacctgacctcatgtcttccagactagcctgacatcaacacacagaaatcacatctcgcacctcatccaggaatcacaagccatcgatgcacaactgatactgagatcccatgtgcacatgcgaatgcgtggaaggaattcaaagtgttacacttcaagctgaatcaataccgcacgataagaattcaagaatgtgaagttttcctaaaggttctgcagcctctcgaagataagtacagacgtctccgtaccgatccgcaagactctactaaacccgctcatgactcatgagacctatgtaacctaggctctgataccaacttgtcacgacccaaaatctaaccatggtcgtgatggcgcctatcgtgttacaaggcaagcctatttcccaaaatattactactaaatcgattataagaatttaataaaacatttccaacatttgaattttttcataaactaaatcaaccctaaatataattatagaaaatacggaaacgagccccaaacattggggtttcactaagtcataagcgtctaaaactataaactaagatatataaactatctaactgtccaaaagaagaaatgacaaaaggagtaacaaggttttgcggacactagcagctaccttgtaatctccacagatagccggtctgaactcaacgatcgccgcgctctaactcacctggatctgcacataaagtgcagggtgtagtatgagtacaaccgacccactagtaacagaaatacctaaggaactgaggagtagtgacgagctaagtaaaacagtccaattatttattttcacaatttaaaaataaacagaaataaacaggtaaattccataactcagtaaatgccacaaagaagtttaacagataaatgcagcaacaacacaaataaatacaacctcacagcagtgccactccatcactcatcactcgcactcagcactcaacactctataggtacctgcactcactgggggtgtgtacagactccggagaggctcccaaagcccaagcactaagcacagacagctcacgtgccataatatcaatacctggatccgcacggtcagctcacgttctacgcggacaactcacgcgctatggtatcaatacctggacccgcacagtcagctcatgtgctatgcggacagctcacacgctatggtattaatatcctcacaaccaggccctcggcctcactcagtcatgtacctctccagcctcacaatacaccacaaataaggggacatagcccacatcaagtatcacaacatatcagcaaaataatagagactgaggtaaacatgtacaataatttctatgannnnnnnnnnnnnnnnnnnnnnnnnnnnnnnnnnnnnnnnnnnnnnnnnnnnnnnnnnnnnnnnnngtgcaaagaatgtgagcatgaataaagcgtaagcatgatctctaacataaaggcaaacaagttcaacaacaaataagcacataaccacaaataataaccattagtcctcacagcctcacgggatggaccaagtctcaatccctcacggtgcacaccacacgcccgttcgtaacctagcatgggtatcgcttccaaacaatcacgagatgtcaaatctctgggtctataccctcacggctagagttaaaattgttacttacctcaacaacgtaaaatcctattccggaatgccctcgtctctggactcagtatccaaaagctccgaatctaaccaaaaatcagaatactactatcaacatgtgctaaagaatcgaattccacaataaaaactacaaaatatgccaaaaatacgaaatcggccaaaatccggcccccgggaccacatttcagaaccagtcaaaaatggtagaattagaactctcatcctctcccgagtctaaccatataaaatttatcaaaatcggactccgtttggtccctcaaatccctacctaaaactctccaaaactcaagnnnnnnnnnnnnnnnnnnnnnnnnnnnnnnnnnnnnnnnnnnnnnnnnnnnnnnnnnnnnnnnnnnnnnnnnnnnnnnnnnnnnnnnnnnnnnnnnnnnnnnnnnnnnnnnnnnnnnnnnnnnnnnnnnnnnnnnnnnnnnnnnnnnnnnnnnnnnnnnnnnnnnnnnnnnnnnnnnnnnnnnnnnnnnnnnnnnnnnnnnnnnnnnnnnnnnnnnnnnnnnnnnnnnnnnnnnnnnnnnnnnnnnnnnnnnnnnnnnnnnnnnnnnnnnnnnnnnnnnnnnnnnnnnnnnnnnnnnnnnnnnnnnnnnnnnnnnnnnnnnnnnnnnnnnnnnnnnnnnnnnnnnnnnnnnnnnnnnnnnnnnnnnnnnnnnnnnnnnnnnnnnnnnnnnnnnnnnnnnnnnnnnnnnnnnnnnnnnnnnnnnnnnnnnnnnnnnnnnnnnnnnnnnnnnnnnnnnnnnnnnnnnnnnnnnnnnnnnnnnnnnnnnnnnnnnnnnnnnnnnnnnnnnnnnnnnnnnnnnnnnnnnnnnnnnnnnnnnnnnnnnnnnnnnnnnnnnnnnnnnnnnnnnnnnnnnnnnnnnnnnnnnntatggattcatgaaatataaccaaagtcgagtagagaacacttaccccaattcctatggtgaaaatcgcctccaaaataacccaaagccgagctccccaactcaaaatatgaccgaataaacaaacccttgttttatatatttgtctgctagctattctgtctcgtttctcatacccaacaatcctgaaactcgctttttatgcctcaaatggattacttgtgaaatgttagtcaagttaggattttgaatcacttaatttgaccttataatgaaggagatatgtatgttttaatatttgcaaatagaacagatttttaaataccaattcagtggcaagttcgtaattaatctgaaaaatctggcaacccaattgttttagtaaaaggactataaattcctcatacgatgcccaaattcgacgaatctttttattatagatccgtaattacgatacggatctaatgctttgatcaaaatagaaatcggagctcatttgcttaatgtggtaccatttatgctggaagaaacgacgtcgaaacataagaaaaacgagcacaacgcactccaaacctatctgaaactcacccgaactcctcgggaccccgtacgaacatactaacaagtcccttaacaaaacacagaccaactcaaggcctcaaatcatgcataacatttaaacaacgaaacgcacctcaaatcaaactaaataaactttcaaactttcgacttccaaaaactcgcgccgaaacatatcaaatcaactcggaattaactcaaattctgcacacacgtcacaaatgacactacgaacctactccaactttcggaattccattccaaccccgatacctaattttccacttccggccaaaatcgtcaaatttctaactttcgccaattcaagcctaattctaccacggactttcaaattacattccggacacactcctaagtctaaagtcacccaatgaagctaaccgaatcataaaaatcccaatccaaattcgtttactcataggtcaacttctggttgactgtttctaacttagctttctaactaagagtctaagtgccttatttcactcctaaactactccgaacccaaactaccaattcaaaacaactcaacacagctgaaaacacacaaataagcagaaatgggggaaacggggttataactctcaaaacgacgggtcgggtcgttacattctccccctcttaaacaagcattcgtcctcgaacgagccaagagtggttctcaaaaccatcaaaccactggataaccttaccttgcatatacccgggggtgatcccatgccacccctatccaatgtaggtccgataacacaacataagtgaagtttctcaactcaaccaaacccacgagccttggatctaaatcctgcaacctacacactgtataagtctaaacaagccgtctccagtcatagccataacccaagatgaattcacatggtccatacgccagtagaaaatacacatctctaaccgtggtagaaagcatcaagaactctctccgaaccccatttgctcaaaaccaatccgtcaggactgaatccttctaactcaaccaagctatgcaggccaccaaaaatccaaggacattgccacaaaacacttgtagaactcattacctcatacacacccaaagaactaatcatatccattaccatgccgatccaacctactaccaagatgtcctatctatccaagtcccttctaaattaccttcaaattgatacttcgccctgccataacaccacaatcctcaacccagactcaccacacgagatccaagcataaaaccacaccgccctaaggctcataagcctctgaatactctcttaaatatccccaaaagtaccacaagcacgcgctaacacaatcaacaccttagtgctcaagctacagtcaaaacccggcctcatgtcctccagactagcccgacatcaacacacagaaatcacatctcgcacctcatctagggaatcacaagccgtcgatgcacaactgataccgagcgcccatgtgcgcatatgaatgcgtggaaggaattcaaagagttacacttcaagttgaatcaataccgcacaataagaattcaagaatgtgaagttttcctaaaggtttggtagcctcgcgaagataagtacagacgtctctgtaccaatccgcaagactctactaaacccgctcatgactcgtgagacctatgtaacctaggctctaataccaacttgtcacgagccaaaatctaaccatggtcgtgatggcgcctatcgtgttacaaggaaagcctatttcccaaaatattactactaaatcgattataagaatttaataaaacatttccaacatttgatttttttcataaactaaatcaaccctaaatataattataaaaaatacgaaaatgagccccaaacatcagggtgtcactaagtcatgagcgtctaaaactataaactaagatatataaactgtctaattgtccaaaagaagaaatgacaaaaagagtaacaaggtcctacggtcgctagcagctaccttgtaatctccacagatagccggcctgaactcaatgatcgtcgcgctctaactcaactggaaatgcacataaagtgcagggtgtagtatgagtacaaccgacctaatagtaacagaaataactaaggaactgagcagtagtgccgagctaagtaaaacagtccaattatttattttcaaaatttaaaaataaacagaaataaacaggtaaattacataactcaataaatgccacaaagaagtttaacagataaatgcagcaacaacacaaataaatacaacctcacagcagtataactccatcactcatcactcgcactctacactcaacactcaaaacactcaaccctctataggtaactgcgcttactgggggtgtgtacagactccggaggggctcccaaatcccaagcgctaagcacggacagctcacgtgcgataatatcaatacctggatccacacggtcagctcatgtgctacgcggacaactcacgcactatggtatcaatacctggactcgcatagtcagctcatatgctacgcggataacatgctatggtattaatatcctcacaaccaggccctcggcctcactcagtcatgtacctcttcggactcacaatgcaccacaaataaggggacacagcccacatcaaatatcacaacatatcagcaattaatagagactgaggtaaatatatataataatttctatgactgagtgcaaataatgtgagcatgaataaagcctaagcatgatctctaacatgaaggcaaacaagttcaacaacaaataannnnnnnnnnnnnnnnnnnnnnnnnnnnnnnnnnnnnnnnnnnnnnnnnnnnnnnnnnnnnnnnnnnnnnnnnnnnnnnnnnnnnnnnnnactcacaacctcacgggacgggccaagtctcaatccctcgcggtgcacacccacacgcccgtcgcctagcattggtatcacttccaaacaatcacgtgatgtcaaattttcgggtctataccctcaaggccagagttaaaactgttacttacctcaacagcgtaaattcctactccggaatgccctcgtctctggactcggtctctaaaagctccgaatctaaccaaaaatcagaatactactatcaacatgtgctaaagaattgaattccacaataaaaactacaaaatatgccaaaaatccgaaatcggccaaaacccggcccccgggcccacatctcagaaccagtcaaaaaggaaagaattagaaccctagtcctctcccgagtctaaccatataaaatttatcaaaatcggactccgtttggtccctcaaatccctacctaaaactctccaaaactcaagnnnnnnnnnnnnnnnnnnnnnnnnnnnnnnnnnnnnnnnnnnnnnnnnnnnnnnnnnnnnnnnnnnnnnacctcaatttcactttgaaatcattaatcaaatccccaaaacgatgatggatttatgaaatataatcaaaattgagtagagaatacttaccccaacccctacggtaaaaatcgcctccaaaattgcccaaatccgagctcccaaactcaaaatatgaccgaatgaacaaatccttgttttatatattttctgccaaatattctgtctcgtttctcatgccaaacgatcccaaaacttgctttttatgcctccaatggattccttataaaactttagtcaagttaggcttttgaatcactcaatttgaccttacaataaaggagatatgtatgttttaatatttgtaaatagtgcagatttttaaatacaaattcagtggcaagttcgtaattaatctgaaaaatctggcaacccaattgttttagtaaaaggaccatacattcctcatacgatgcctaaattcgacgaatctttttgctatggctccgtaattacgatacgtatctaatgcttcaatcaaaatagaaattggagctcatttgcttaatgtggtaccatttatgctggaagaaacgacgtcgaaacataagaaaaacaagcacaacgcagcccaaacctatccgaaactcacccgagctcctcgggacctcgaacgaacatactaataagtcccataacataacacagaccaactcaatgcctcaaatcatgcatagcaacatttaaatgacgaaacgcgcctcaaatcaaactaaatgaactttcgaactttcgacttccaaaatctcaagccgaaacatatcaaatcaactcggaattaattcaaattttgcacacacgtcacaaatgatactacgatcctacttcaactttcagaattccattccgaccccgatacctaatttttcactgccgaccaaaatcgccaaatttctaactttcgccaattcaaacctaattctaccacggacctccaaattacattccggacacactcctaagtctannnnnnnnnnnnnnnnnnnnnnnnnnnnnnnnnnnnnnnnnnnnnnnnnnnnnnnnnnnnnnnnnnnnnnnnnnnnnnnnnnnnnnnnnnnnnnnnnnnnnntccaatttgaattcgtttactcataggacaacttccggttgactttttctaacttagctttctaactaagagtctaagtacctcatttcactccaaaactactctgaacccaaactaccnnnnnnnnnnnnnnnnnnnnnnnnnnnnnnnnnnnnnnnnnnnnnnnnnnnnnnnnnnnnnnnnnnnnnnnnnnnnnnnnnnnnnnnnnnnnnnnnnnnnnnnnnnnnnnnnnnnnnnnnnnnnnnnnnnnnnnnnnnnnnnnnnnnnnnnnnnnnnnnnnnnnnnnnnnnnnnnnnnnnnnnnnnnnnnnnnnnnaacaactcaacacagctgaacaacacacaaataagcagaaatgggggaaatgggctataactcttgaaatgacaggccgggtcgttacacattctaagggcctgggaaattttgccttcccgaacacgaggcccttactgcgttcgcgaagaaggattctactgtgttgggcagaatgttttaaaaatggggctcaaccatttttgagccgattttcttctttcttgggcgattttggagcttcttgagagggatattcacctagcaacttggaggtaagtaaattctacctattgtgagttaaatacatagattatagatagattttaacatgtaaattagtgaaaattgtgggtttagatgaaaaacctatgtgttcataaaaaaaaaaatgagattttaaccacgaaaatggttatggaatgggataaaaattgtatacttgagttcttaaggttatgagtaaagatttcctccaaacattttcggaatccgggcacgtgtgccctagatgaattttaggaattcttccaataagggttgattaattaatctaataattaaattatgaatttttgagtatgtattgattaaattatataatatttgactagtttcggattgatcggcaccgagttggagatttagaatgaaattgtgaccggaaagtgggctttgaaaggaggtacgtatcttgtctaaccttgtaagagagaatttacaccataggtgaattaaattaatgttagtttctaattgtggtggctacgtacgtacgaggtgacgagagtccgtgcatagctactaattatgcttacgtccgggtagttttaggacccaaatcatgaactactgtgatgtgttccaccctacttgttaattaaagtgcctaaattatattagaacttgctagacgattttgtggaagatcgctaatgaaatttgtattattttgtgtattaatccttaataacgttcaagccaaatgcttataaagtatccttctcttcttgtggagcaggccgaatgcctcggcggtagatagatgcatctatggttcatgccgctcgacccttggcagtgtacacgttattctggatcgggccgtacgacctcggcataaatcgtgcttaataataataatacacaatgcttcgatattttgttgtggcttggaaggttcactactagaaaaaggcggattacctgaggatatttacttgagtataaaatccccagatttacctgcggattttcttgccgtacttaaaaattcttaaattgtaaaatattatacatgcgaatttgatttaccccgataaatccgcaggtatttttggcaccattaggcgcaaacataataactggggaattacaaagggacataatctctaagtcctctatccgtaggtgaattagtaggtaaaacatatttttatttcgtttatggattggcagaaaatttcccaggtaactgttatgcgaagttagctgcagattagttcatggggatgtacctagggatatagttttcctggggaattatccggggatagttttttatggttttacatgggaaatatttcctagggaattaccaggggatttattactgtgaatattttcatggggatttatgtggggacttatatacttgggggaattacctggggattatctattgcggtgctacttggaaattctttaatagagattcacatgtgatttatttacctagaaaacattcctggggatttacctacatatttatttacccggtaaaattgcctggggaatatctcgaagcggtttcacctaaatttttctgtggagaaatacccgaggatttaatttcttgtgttattagttggggatttgtgtattgcgaatttagctagagcatttgtcttggtgatcattttgctgaggatttctgtcactctggttttttttttttcttgcatcaggatttacttgctccgagcttgagtcatagtactgtctttgaaaataacagatggtgtattgagaatttaattacaaactgaattatttttgcattgatttgaaatttattatctctttgtatttaagtttattgtctctaattcttaaaattattaatttagctatgcatgtataaccgggaataaaaaaaatatataccaagctaataagagggcatgtgggtgcaatctgttggtgcaatctgttggtggaaagaaaaaaggaagggttgcaggccttggctccttgggtcgatatgtaaaacacttaagcattcaacatctactttaccagaagaaattgatgagataattaaatctcaggtgcatgcttccaatgttgacttatatgttcagctgtaagaagagagtcacaaaaataaaaagatgaggaaagaattagacttattgaagaagtatgtcaatttcaatgcatcatctttaaatgagttatcatctcaagaagacaatcaaggatccgagaatgaaagtgacgatgactctgataatgtgaatgaaagtggttctaaccccggtaacgcgaatgaaagtgactataatcatgatnnnnnnnnnnnnnnnnnnnnnnnnnnnnnnnnnnnnnnnnnnnnnnnnnnnnnnnnnnnnnnnnnnnnnnnnnnnnnnnnnnnnnnnnnnnnnnnnnnnnnnnnnnnnnnnnnnnnnnnnnnnnnnnnnnnnnnnnnnnnnnnnnnnnnnnnnnnnnnnnnnnnnnnnnnnnnnnnnnnnnnnnnnnnnnnnnnnnnnnnnnnnnnnnnnnnnnnnnnnnnnnnnnnnnnnnnnnnnnnnnnnnnnnnnnnnnnnnnnnnnnnnnnnnnnnnnnnnnnnnnnnnnnnnnnnnnnnnnnnnnnnnnnnnnnnnnnnnnnnnnnnnnnnnnnnnnnnnnnnnnnnnnnnnnnnnnnnnnnnnnnnnnnnnnnnnnnnnnnnnnnnnnnnnnnnnnnnnnnnnnnnnnnnnnnnnnnnnnnnnnnnnnnnnnnnnnnnnnnnnnnnnnnnnnnnnnnnnnnnnnnnnnnnnnnnnnnnnnnnnnnnnnnnnnnnnnnnnnnnnnnnnnnnnnnnnnnnnnnnnnnnnnnnnnnnnnnnnnnnnnnnnnnnnnnnnnnnnnnnnnnnnnnnnnnnnnnnnnnnnnnnnnnnnnnnnnnnnnnnnnnnnnnnnnnnnnnnnnnnnnnnnnnnnnnnnnnnnnnnnnnnnnnnnnnnnnnnnnnnnnnnnnnnnnnnnnnnnnnnnnnnnnnnnnnnnnnnnnnnnnnnnnnnnnnnnnnnnnnnnnnnnnnnnnnnnnnnnnnnnnnnnnnnnnnnnnnnnnnnnnnnnnnnnnnnnnnnnnnnnnnnnnnnnnnnnnnnnnnnnnnnnnnnnnnnnnnnnnnnnnnnnnnnnnnnnnnnnnnnnnnnnnnnnnnnnnnnnnnnnnnnnnnnnnnnnnnnnnnnnnnnnnnnnnnnnnncagtttcgcatttgagatatttttcttgttcattaaggattatatgatattaatattaacgttaggaatatttttttttcttttctataattatattagacatttgttgaatgattatgataatatagttgaatcgtaagaatataagctagaataaaataaaaataacatcttgaaaatgcatagatgacttgcgaattttcatgggaaattattttgaaacgtgtcaatttatagggtaatttacctgtaaaaatatttacatggggattttcttaccaatattacatatggattttcctacgaaaacacaacttgtggattttcttggggatttcaaatagttcttttgtttcattggaaatttttacatggtgatttaccaacgaattattacttgggaactttgctggggttttacatgcaacattttcatgggaattttcttgcgaaaatgtgctcctgcagatttcacctcaaaacttcctatggacttaaggattttcatggggaactacttgcggatttcttcctacacaaaatcacaagaaaaatccttttgttacgaatttttaccgaaatattattgcgatatttttgagatttttccctgataaatccgcaagttacacggggatacaaaatgcccaggtaatttccctggggatatgtaaattcccatgtaataattagctacggaggtttttccaacagatttattttgataggaaattccgcagaaaatcaaagtacctgcggatttctttatcttattccttggaaaagccctaggtaatccacctttttctagtagtggttacagcttgcaaagataaaagacttattggaaattattaaattgtgaaagaattatttgctcctgcttgctaaattgtgaaagaattatttacataacccgtgtttatttgtaactatccgaccggtcgttttgagcattttcacttcgctcgattgtttgagggcatgagtagctctgtaggatgtattataacgtatgtgaatcatcggttttggctttcaggttattcagaattgatttggaggaatgattctcagctagaagctttaaatttgaaaggtttgactaggttttgactttttagtatttgacctcggattgcattttttgatgtttccttagccccgttgggtgattttggacttaaaagtgcgtccgaattatggtttggaggttcgtagtagaatttggctcgaaatggcgaaagttggaattttggaaagtttgcccgggactggactttttgatatcggggtcggattccgattccgaaagttggagcaggtctgtaatgtcaaatgtgacttgtgtgcagaatttgaggtcaatcgtacgtgatttgataggtttcggcatcggttgttatttgtgttttgaggcctcgagtaggtccgtgttatgttatgggacttgttagtacatttggacagggtcctgagtagctcgggtgagtttcggacaaggttcggaccattttcattccatgttgcattgctgaagattttctagttctggtagaccgcacctgcagactgtataacgcatgtgcggagccgcaaaagcggcagtgccatcgcaaaagcgagaaagagagctgggcgtcaggatcacaggtttcgggtgctaggacgcacctgcgcaaccacagatgcggttcaagtgcacagaagtgttatcgcagaagctgcttaaggaccgcaggtgcgagattttgctgagtgaggctgtttcgcagaagcgagtaatttccgcagaagcggtggtcgcaggtgcaatgaattgtccgaaaatgcgaaaatagatgggcagaacctataatttgacgtctttggtttctaacttcattttcggattttggagctaaaattgggcgactttggagaggagattttccacacaacttggggtaagtgttctctactcattgttgatcttatatcacaaatctaccctcatttttggtaaatggattgtgaattttgtagaggaaattgggggtttttccctaaagtttcataatattaatttttgaattttgaacttcgaattggagttggatttgagtgaaactagtatggttggactagtaattgaatgggttattgaatttattaaattttgtcgggttccgaggtgcgggcccgggttgggattttggtcaattttgggattttgattcaagatttgatcttttgcgatcgggattgattcctttagcattatttgatgtacttgagttgttttggttagtttcgagccgttcaaatgtcggaacatgcgggatggcattttggagcattgcttggcttgctcggtgttagaattggcttgttcgaggtaagtaactcttctaaacttagtgttgagtgtatgaaaccacgtaatacgtgttatgtgattggtattaaggtgacgcacatgctagtgacgggcgtgtgggcatgcaccatgtgaattgggactccgttgtttccatggcactgtatagtggccctattgttgttgatgtccttgttttctccatgtgataaagtagttgagttgtcaatcatgttagatatcatgtttaggctttatgctgatactgttaggacccatagtggtcgtttcttgctgtcatctcactgatttcattgatatttcgtactcagtcatatttattcattcatatgatatctatatctcagttgttattttttgatacatcatatcattatcgtcgggatagtttcatgacattgtgagcccgtgagtgagactggagatattgatgactgagtgaggccgaaagcctgattatgaatgacagttatgggatcgggctgcacaccgcaacatgttatattattatatatgatagtgcttaggctataggagcccctccggagtcagtaacacacccctagtgagcgcggatgatactattgaaggatggatttccctgggcatggatttgtccgaagtacttactacctggagatggatttctccacagggtttgattgccctttttccttgatactgggtgacttatagtcagtgttgtatatgttctaggatggatttccctttatgggccatatacaatatcgaggggttgagcatgatgagtggaaagtgtgagacagtgagattgagtattctgagaggatgagtacatgattcatctccgagatacatggcattggcatgcacacatgacatacaggcatagagatgcattttttctcatgttgtacggtaccatgtcattcatgaatttttacacacattgatatgtgggcatagagaggtatttcacatttgctatctggaaagaaaacgaaatatctaacttattgtggaaaggatttttggtaaaatttacggttttcaaattatcccatattttacgacgattttggtaaaggatttaagttttcactaatatttttgaaaagtggaactattttcggaaaactgtgaaaatgctgagcatttgtatcgctgagttactttcttatttatattctctacgttgttatgaactgctattgattattagggttggacccgacctatgttccagctcgtcactgctttcaacctaagtttaggtttgttacttactcagtacatggggtcggttgtgctgatactacacttctgcacatttcgtgcagatgttggctgatgttgttgctgtgctcgatagttgccggatttgaagatgtacctgtgttcctattaaagctgcctcttcttcatggtagccttagatttatgaaaaaacaaactatgtttatgtacctttcaaacagaagatgtatttacttcacatcagctttgtaaattctattcttagaagctcatgattgtactaccagttcttgggaaaatgtattagttttatataatttcttttgaataattgtattattaatattattggaattggatagttgttaattggcttacctagcgggttgggttaggtgccatcacgactagttagattttgggtcgtgannnnnnnnnnnnnnnnnnnnnnnnnnnnnnnnnnnnnnnnnnnnnnnnnnnnnnnnnnnnnnnnnnnnnnnnnnnnnnnnnnnnnnnnnnnnnnnnnnnnnnnnnnnnnnnnnnnnnnnnnnnnnnnnnnnnnnnnnnnnnnnnnnnnnnnnnnnnnnnnnnnnnnnnnnnnnnnnnnnnnnnnnnnnnnnnnnnnnnnnnnnnnnnnnnnnnnnnnnnnnnnnnnnnnnnnnnnnnnnnnnnnnnnnnnnnnnnnnnnnnnnnnnnnnnnnnnnnnnnnnnnnnnnnnnnnnnnnnnnnnnnnnnnnnnnnnnnnnnnnnnnnnnnnnnnnnnnnnnnnnnnnnnnnnnnnnnnnnnnnnnnnnnnnnnnnnnnnnnnnnnnntagattggtatcaaagccttaggttcgtaggttctacaagtcatgagcaagtgtctagtagagtcttgcggatcggtatgatgacgtccatacctatcttcgataggctacaggacatttaggatatatttcccatctttctttcattatcgtacggtactaattcagcttgaggcgtaatacttcgaattccttccatgcattcgtatgcgcacgtgagtgctcggtatcagctgtgcatcgacggttggtgatttcctggatgagggcaagatgtgatttctgtgtgttaatgatggaccagtctgggggacttgaggctgatttttgactgtagctggaacactgaggtgttgacggcgcgagcacgtacttttggatttatatgtccggtagtgtcccaattagtagaattggtggttggatggctatgtgatgagtatgatgtgactggcaagatgtgttcatatgatttgaatgtgacgagaagggtttgcttgaggtgtagaaagaactatttagtgcttgatttccatcttgatttgacatatagtctcgagttatgggtatgttgaaggatccttttcatgttgttcagttgaggagtggagtagattttcatgtcatgatatgagttcagactcaggaagattaagtggttgcgtaatagttatgattgtggaagtgtacagaaagatgtcagtttgaggctaagcatgtgggttatctcctgcgggatgtcctgaggttatgtgatccctatgttattttgttgagagttcccttttaccagtaaattatatgtagtgcaatttgagtttggatcgcttgtggaagttggcttgactgttacgaggatgaatgcaaaatttgcaaaatgatttaatgtattatgtggtatgtgttacatgagcttaggaaggatttagttgaatcctattgcggtgttatgccagtatggggtggctatcgtaagttatcatatgctttattccttggccttgagccaagtgggggagtctactatcgacaggttgattcggttatgcgttatattggtttcagtttgaggtatactggtgaatcaattatgacttacaaaggttgagatcgagggtgacttgagtaaaggaagttttggataagggttgtgttattctttatgggtatatgagaaacattggatgatttagttgttatttgtaaaggatgtagcatgcatggggtagggattcactcggttgctttggattacttccttgggtgttgttttgctaacggggcacgagtcgttcggtttgtttgatcaatttcattgagagctgagtagagtggaagactctcaaggatggttctaatggattaaagatttaaatatggcagttaagaattttgcggatttgtgcatggctaaaatcagagagttacactggatggtgtcgagaatcgaagtatttctacatcattgtggattctacattttagtatcaggaaggcaagatgaacagcttgaaattcacataaggtctcttcgaagttggtatcttgattgtggtacttttgtggcgtttaagagagcattcagcggcttatgagccttagggcagtgtggttttatgctagggtatcttgtggtgagtcttgggttgaggatttaagtattatggcaaggaagagtatcaatctaaaggtaattcagaaggaactcggagaattaggacaatttagtaacgggttggatcagcatggtaaccgatgcaattggctcttttgctgcttatgatgtagtgagtttctacaggtattttgtggagatactcttgggatttgacggcatgcgtagcgtggttgagttagaggggttcagtcctgacggtttggttttgtgcaaatggggttcagagagttcttgatggtttcaaccacggttagagatgtatatttcctattggcgtgaggagcatgtgatgtatagtgattttctcctagaggtgatcaaatggaaagttcttggctaattaagtatgcagttgcttgtgactcggagtggattatgaagatcttgtattttttttgtatgatggcatggtatgtgcggtgtgatgtgtatgattgagtattgcatgtgtaaggtcatgactaaattttaaagggaaggtcatgagtccttaggcaacatagacagtttcggatgactaggtaaatgataatactatctggtatggcttgataagggtatacatttcagaaggggcaatgtgttttgatttatggatacttcattggtattgcggcactctcttgtttgatcgactgctgatgttcaaattttgctttgtggcatagaagaattatagaagtattcctcatgggatgatcgtgtattggagtagtgctagacacttaggtggtggagttgtgatcagatatggtgattcatgtgttctatggatttggagactgggagttctcatgagtagattgtttcatggttgtggactgtgaaaatgtagacaaggttagttagaagatagtatgtgtttgtgatttagttattgtgaactttcggagggttatttatctattgtgggtgacgagagttgatttggggttcattggcaggcccaatatggaggtgggttctgcaccgagtcagattggttggctccatactgccattattgagggatgtgccattcggttgttgttgagcttattcgtgttctgaaatgacttgtgaattactcttctatgccacgagaagttgtgattcgttggttatatgcacatatggtgcagttctatttcagctttatagcaaaatttgagagagatgagtatttgggtattgcataattgattgtgcattggctatgttctttccggattgtggtattgtgttatttgctctccgtggttatggtaatgcactttgggtacttgatatcgaatttcacgtggttattgattttgggcaaggtggctcgaggtatataatatggaccagcgtttggatggggtcacacattgcagcgaagttatgttgggatatgatcctttatgttggattcatgtgttttggttctacagtgtgtgctaggctcttagcatggtgttgtgatggtacttgttaagctggcgggacagtcctctcattttaggcattttcaggattgagtacatttagaatgttcctatttggtgcacgggttgtggatttaagctgtgttgatgtgtcatgtcactagagttattattttagatgggatgaggtcatcgtactagaatgggtgctatcagatatgattgcagtatatttggaaggatattgatgctgatcggcttataaatttgctataattcctatcgaaggagaggtagttccacaacttgttgatctggtgaatggttatgagtttctgcgtgtttctttcatcgttggcagtatatgaaggtgttagaacgaggctttgtttgataaaaggtttattaccggtattgagttattttgagcagctactgtgattagaaattatagctatgagtgtttgagttatgtggtatatcatgtgatttcatcttgagttatggctatgactggattcaacttgttcagacttatacaggttgtagatgcgaggttctgatcttatcaaaaatttcggatgtggaaattggaatctaaagcttatgggctaggttggattaagaaatttcaatcatgttgtgttatcagacctatatgggatagggtgacgtgggatcacccccaggtatgtgcatggtaaggttacacgacgatttgatggcttttggaacaactctgggcacgttcgaggacgaacgtatgtttaagtgagggaggatgtaacgacccgaccatttgttttgagcatttgcaatttgctcggttgtttgagggcaagaaaagctccgtaggatgtattatgacttatgtgaatcgtcggttttggctttcaggttattcagaattgatttggaggaatgattctcagctagaagctttaaatttgaaaggtttgaccaagttttgactnnnnnnnnnnnnnnnnnnnnnnnnnnnnnnnnnnnnnnnnnnnnnnnnnnnnnnnnnnnnnnnnnnnnnnnnnnnnnnnnnnnnnnnnnnnnnnnnnnnnnnnnnnnnnnnnnnnnnnnnnnnnnnnnnnnnnnnnnnnnnnnnnnnnnnnnnnnnnnnnnnnnnnnnnnnnnnnnnnnnnnnnnnnnnnnnnnnnnnnnnnnnnnnnnnnnnnnnnnnnnnnnnnnnnnnnnnnnnnnnnnnnnnnnnnnnnnnnnnnnnnnnnnnnnnnnnnnnnnnnnnnnnnnnnnnnnnnnnnnnnnnnnnnnnnnnnnnnnnnnnnnnnnnnnnnnnnnnnnnnnnnnnnnnnnnnnnnnnnnnnnnnnnnnnnnnnnnnnnnnnnnnnnnnnnnnnnnnnnnnnnnnnnnnnnnnnnnnnnnnnnnnnnnnnnnnnnnnnnnnnnnnnnnnnnnnnnnnnnnnnnnnnnnnnnnnnnnnnnnnnnnnnnnnnnnnnnnnnnnnnnnnnnnnnnnnnnnnnnnnnnnnnnnnnnnnnnnnnnnnnnnnnnnnnnnnnnnnnnnnnnnnnnnnnnnnnnnnnnnnnnnnnnnnnnnnnnnnnnnnnnnnnnnnnnnttgatggtttcgttagctccgttgggtgattttggacttaggagcgtgtccggattgtggtttggaggtccatagtagaatttggctcgaaatggcaaaagttggacttttggaaagtttgaccgggagtggactttttgatatcggggtcggattctgattccagaagttggagcaagcccgtaatgtcaaatgtgacttgtgtgcaaaatttgaggtcaatcgaacgtgatttgataggtttcggcatcggttttagaggtggaagtttcaaagttcaatgatttcgaattaaggtgtgattcatcatttcgatgttgttatgtatgttttaaggcctcgagtaggtcagtgttatgttatgggacttgatagtacatttggacggggtcccgagtggctcgggtaagtttcggatgaggttcggaccattttcattccatgttgcattgctgaagattttctggttctagtatgaccgcacctacggagtgtatagcacaggtgcgaagccgcaaaagcggcactgccatcgcagaagcgagaaagggagctaggcgtgagaatcgcatgtacgggtgcttggacgcacctgcgcaaccgcagatgcggttcaagtgcgcagaagcgcgatcgcagaagcggcttaaggaccgcaggtgcgaggttttgctgagtggggctgtttcgcagaagcgaggaatttccgcagaagcggtggtcgcaagtgaggatcgctggggcagaacctataattcgaggtctttggtttctatctttattttcagattttggagctcggattgggagactttggagaggagatttcccacacaacttggggtaagtgttctctactcattgttgatcttatatcatgaatctaccttcgtttttggtaattggattgtgaattttatagaggaaattggggagtttggcctaaagtttcataatattaatttttgagttttgaacatcgaattggagtcggatttgagtgaagctagtatagttggactcctaattgaatgggttgttggattttataaattttttcgtgttccgaggtacgggctcgggttgggcttttgattcaagatttgatttttttcgatcgggattgattcctttagcattgtttgatgtacttgagttgtttttgttagtttcgagttgttcggaggtcggaacacgcgagatgtcattttggagcatcgcttggcttgctcagtattggaattggcttgttcgaggtatgtaactcttctaaacttagtgttgaaggtatgaaaccccgtaatacatgttatgtgattggtattgaggtgacgcacatgctaggtgataggtgtgtgggcgtgcaccatgtgaattgggactccgttgtttccatggcactgtatagtggccctatttttgttgatgtccgtgttttcaccatgtgataaagtaattgagctgtcaatcatgttagatatcatgtttaggctttatgccgatattgttgggacccatagtggacgtttcttgctgtcatctctctgatttcattgatatttcgtactcagtcatattcatgcattcataccatatctgagtctcaatttttatttattgatacatcatatcattgtcgtcgggctaattttatgacattatgagcccatgagtgagaccggagagattgatgactgagtgaggccgagagcctgattatgagtgacagttatgggatcaggctgcacgccgcagcatgctatattgatttatgcctggatctggcgctagggttgtaggagcccctccggagtctgtaacacaaccccagtaagcgcggatgatactattgagggatgggtcttcttggacatggatttgtccgaagtacttactacctggagatggatttctccacagtgttggattgccctttttcctcggtactgggtgacttatagtcagtgttgtatatattttgggatggatttctctgggccatatacagtaccgagtggtttagcatgatgagtggaaagtgtgagacagtgagattgagtattctgagagggtgagtacatgatgcatctctgagatatatggcattggcatgcacacatgacatacaggcatagagatgcatttttcctcgtgttgtacggtaccaagtcattcatgaatttttacacacattgatatgtgggcatagagaggtatttcacacttgctatctagaaagaaaacgaaacatctaacttattgtggaaaagatttttggaaaaatttacagttttcaaattatcccatactttacaatgattttggtaaaggatttaagttttcactgatattcttgaaaagtggaactattttcggaaaactgtgaaaaagctgagcatttttatcgctaagttactttcttatttatatactctacgttattatgaactgctattggttattggtgttggacccgacctatgttccaactcatcactgatttcaacctaagggtaggtttgttacttactcagtacatggggtcggttgttttgatactacacttctgcatatttcttgcagatgttggtgattgttgttattgttgtgctcgatggttgccggatttgaagatgtacctgcgttcctattgtagctgcctcttgttcatgatagccctaaatttataaaaaaaaaaactctatttatgtacctttcaaacagaagatgtatttacttcacatcatctttgtaaattctattcttagaagctcatgattgtactaccagttcttggaaaaatatattagtttcatataatttcttttgaataaatatattattaatattattggaattggatagttgctaattgaattacctagcgggttgggttaggtgccatcacgattagttggattttgggtcgtgacattatttaggatttctatcttaataacattgacccatagtatgtgtcgaagtcgacccctcgtcgctacttctttgaggttatacttgatacttactgggtgcgcgtttatttacgtactcatgctacatttgctgcacttttgtgcaggatctgaggcaggtgcatcaggtggtcctaccggcgcgcatcgcagatatcccaaggcatagtgatgagctacttcctgagccgttctgcaacccctagaatctctcttttgtatttgtattctgtctattttatgttcagacaataactagaattttgtataatctactagatgctcatgcacttgtaacaccaggtcttggcacacacactagtagaattgtggtttgggactattacttttgttatgaatgcactcaactattttgttttatttatttaaacttatttattttcttaaatcttgcaaataagaaatcttaaattactcgaaaacttattaaaagaggaataatttgtctaatccactatttggcttgcctagcggtaacgttgggcgccatcacgatctacatgggaaattgggccgtgacatgtgaactctatgttaaaagggtaaaaaaggcgaacgacatttcgctaaggactttctatttgcgcatgtaccccatctcgacgagtgattatttttaaaaaaaaatagatattccattaaaactgtttaagattataaataaaaaattcagctcaagggttgataaattttgatcatatatatatatatctaactcaataaaggaagaaattttgcttcataaaattcatcgatcatcattccatatatttaacttaaacttagttttatttttatagttttatcatctcaactttacaaattatcatgcctccatttcagtttatacaagaatatgtagcatttgaaaatttaagagtgtgtacccttatnnnnnnnnnnnnnnnnnnnnnnnnnnnnnnnnnnnnnnnnnnnnnnnnnnnnnnnnnnnnnnnnnnnnnnnnnnnnnnnnnnnnnnnnnnnnnnnnnnnnnnnnnnnnnnnnnnnnnnnnnnnnnnnnnnnnnnnnnnnnnnnnnnnnnnnnnnnnnnnnnnnnnnnnnnnnnnnnnnnnnnnnnnnnnnnnnnnnnnnnnnnnnnnnnnnnnnnnnnnnnnnnnnnnnnnnnnnnnnnnnnataattaatattcaaaataggtgtttgaaaaaattattaagctcctgaaaataataaatatcacaggtaattacaaaacctgtgtttataatttaccaccaattgagaatttacccacattaccttttggattccactaaaataaaattcgtgaagtggttgatttatcaaaactaaaagcggaaaaaatcttaattaattagttgactnnnnnnnnnnnnnnnnnnnnnnnnnnnnnnnnnnnnnnnnnnnnnnnnnnnnnnnnnnnnnnnnnnnnnnnnnnnnnnnnnnnnnnnnnnnnnnnnnnnnnnnnnnnnnnnnnnnnnnnnnnnnnnnnnnnnnnnnnnnnnnnnnnnnnnnnnnnnnnnnnnnnnnnnnnnnnnnnnnnnnnnnnnnnnnnnnnnnnnnnnnnnnnnnnnnnnnnnnnnnnnnnnnnnnnnnnnnnnnnnnnnnnnnnnnnnnnnnnnnnnnnnnnnnnnnnnnnnnnnnnnnnnnnnnnnnnnnnnnnnnnnnnnnnnnnnnnnnnnnnnnntttatggtatggtttctctctcatttttcttttattatcctatatattttcttagtaaaccaatctcattattgaaaaaccagtgaaaaataaatcattgtttaagtaggaaaggggtccaattttaatatgaaatatgttgttacatgttttgttttttgataacatgatgaaaattaagcttttttgacactatcattgtatgaaaattaaactcttaatatacataaaagatgaaacttacttgaaatttgtgatatcatggtagaatagcctataaaagttttgtgacagtggtgaacagtaggcagcaagcataattaatttttacttaaaaaaaaatacaagagtacaagaccgtactccatttgaaccaaaaagaaaaaagaagaaaagaagaagataaaacgaaaggacgttaatgatgaatttaccttccaactgtagatgatgggagacaaaacttgttttgtgcttttatagattatattttgaatccattcgatacaattcacataattcagtgatcaagagttttcaaacctttgtgagattattgattcataatttcttttaattttcttttttgaaactcattattaaaaattctgcctctgccaccagatgttagcatatcaaagcactacggctttcattctttttaattccaagcgtgcatgtctcttgttaaaaactgttgcttaactttgtatgagaatttcataagataaaagaagtgcttaactttctattagaattttttctattatatagaagagagaagagaggtcgaccaagggtataatggtcattttaaaaatatattagtgcattgtttgtttgttgtcacgacccaaaatcccactacatgtatcgtgatgtgacttagtctctaagactaagtaagccgaatataattacaattcaagccaatttttttaaaaatataaaccaaccgcggaaataattacaaacaacctcccaagactggtaatactaagttacgaactctaactgaatacatgaaatgatctcaaggatcgaatactcaatattgtttgattaataattaacagtacaataaaatggaaggctccaagggactgcgacgaccaagcagctctaccttgaatccttacgatcacactctaactcagtacaagtctgatatctctaatacctggctctgcacaaaaatgtgcagaagtgtagtatgagtacaccacagtcggtacccaataagtatccagactaagctcagtggagtagtggcgagatacagtaaagacactcactagtctaataacctgtgcaatatagtatacaaaaataataaaaaaataaataacaataatgacaacactaatcaaccagtgatatacacaccagggcaacacaaacaccattaatattgctcaacaaataataagtacaagtacacccaattaatcaagtccttcaaatataaatccttcgcctatatgcttctcaaataataatcttcacgatacaatgctttccaataaatatatttaggatatactcccttcaaataaatatctttcaaatataatcctttcaaataaatctctttcaaatataattccttcaaataaatattttcaaataaatctctttcaaatataattaattcaaataaatacctttcaaacataattgcttcaaataaatatctttcgaataaaagtcaccatgtgacctctcatttcaaaatcataaaatacggatctcagctcacgttcatatttccacgacacttcgtgcaaatttttctatcacaaccgcacgaacaactcacgtgtcaatatcatcatcatttaaccacgacacctcgtgcccacatttcatttcataaaccgtctggcaataaccacaggctcccaatttcaacatagatcagactattatcaagtttaccgaaacaacaagataaattccacaagatataaaaataaacataaggaaaataacaacaccacataaaaattaccaacacaataactccatatcatcacatatcatccctgacaacagccacccttatcgctcctatagccacccttatcactcttataatagcctcatttatccctatgccctgacaatatcaatagccacccgtatcgctcctatagccaccagtatcgcttcgtataatagccacccttatcactccgcccggacaatatcccaacacacataaccacagtgaaattctacccttatacccacataatatcaacagtgaaataccacccttatattctcataataataactcaaatcacacaataatttacatggaatattatcacgacaacacaacacaattaatttctaacacaatttacccaacaaccacaaccaattccaatgatatagtaaaatcaataaatttctcaaaaatagcccaaggctccacacaacatatataaaacctcaaaataatcaacaaagatagaaaatactcagtatagggcaattccttcattaatccaaattcctgataattatattaacacctcagtttaaacttatttcattaattatttgcagatgaaaaatccataatataattattttcaggaaatattaaatcaacaaactcacagaattcacataaatattcaattaataatcacatcaaattgtcatataaaaataaattcaacaaatgagaattgaggcatggaaaatagatgatttaataaatgccaataataatccaatttactacacaataatgcctaaaactttaacccaataaaatttgcacatataagcccgagtacgtactcttcacctcgcgtacacggcttttcacctttcacaaatggcacataagactcgatgcctaaggagtaatttcccttactcaaggttaggcaagatacttactttttatttttaaagttaggccgatatttcaaaattgtcttcttgcttgaatggacctccgaacagctcaaatctatccaaattaattcaattcagtcaatacaaattatagggattaattccatatgaaaatactatttttccaacaaaatccaaaatttaactcaaaaattgcctttgggtcccatgtctcggaatcagacgaaactcacaatatccgacaacccattccgatacgagttcaaccataccaattttatcaaatttcgataacaactcgacctccaaatattaaatattcgttcttgaaaagttttccaaaattcttgtttttcttccatttacatccgaattaaacgatgaatatcatcatggatttatgaaatataatcactttcggatatagcacacttacccgagtcatagtcatgaataactcatccaaaatcgcccaaaaaccgagctccaaaatctcaatcgaaaatggcaaagtgactgatttttggtccttatgtttctgcccagtttcgcaccttcgggcagatttgtcgcacgcacctgcgagcttgcttctgcgagcattgttcacgcttctgtgctgtcacaacccagaattcccaccttcgggatcgtgatggcgtctaacattttacttgctaggcaagccaacaagagaaccgttaagtcaattattattcaattcaatagacactgtcaattaaaccaaaatgaaataaagcctataatatttgatacaattcggatctggagtcacaactcacgagcttctaggattttctacaaacagagtctgaaagaaatacaaccgttctgaatgaaacgatacagtaaaaataggggagatagaaggggactccaaggtttgcggacgccagcagatctaccttgagtctccaattagcaagtccaagctactaagcctcacgatcagctagggcaggtaccaaaatctgcacaaaagtgcagagtgtagtatgagtacaaccgaccccatgtactcgtaagtgttgagcctaacctcgacgaagtagttacgaggctatgacaagacacttacataataaacatgtgcagataacagtatatgtacaagaaacaacaataatagctaaacatgtactattgggagggggacatgctaaagggacacaagatataggagatacaatgtaaatgataaacagaacagtcaacatgcttttagccagtgaaaacaactatatagaatgaagaaaattgctcggcatcacccttcgtacttttactctcaacctcacaatataaatcattagatacggcacggcatcaccctttcgtgcatcaactctcataacatggcacgacatcacccttcgtgcattaacactcacaatatggcacggcatcacccttcgtccattaacactcacaacatggcacgacatcacccttcgtgcgttaacactcacaacatcacccttcgtgcattaacactctcccttaccacataataatgaacaagtaatagcagggaggtagaatcaacaagaacaagccttacttcaacaatggttccacaataccaatatcaactttggaatctatactcaattatcacaaaagattgtaaacacgataagaacgatcaatttagtgtaacgacccggctatccgttccgagagttatagccccgtttcccccatttctgcttctttatgtgttgctcagctgtgttgtgttgtatcgggttggtaggttcgtgtacggagtagtttcggagtggaatgagacaccccgtctcttatttagaaggttaagttggaaaagtcaacacgatgttgacttatgagtaaacgatctctgattggaaattttatggttcagataaatacgttaggtgattttggacttaggagcatgtacgaaatgtaatttagaggtccatggtaaagtcaggcttgcattggcgaaattggaaatttggtaatttccggtcggcaatagaaaatttgacatcggagttggaatggaattccgggagttggattagattcgcagtgtcatttgtgacctgtgttcaaaatttgaggttattcggacaaagtttgataggtttctgcatcagttgtggaagtttgaggtttcaagtccattaagcttaaattgttgtgcgattcatgtttttgttattgtttgatgtggttcgagagctcgattgagtttgtatgatactttaggacttgatggtatctttggttgaggttccggaggcctcgggtgtgtttccgggtaagttttgagtgagttcgggcatttccgaaactcaggtatggttctggtgctttgaatttcgcggacctaagcagaatttcgcaaaccgcataattctgccgcggccgcactccggggggaaaagttctacagattcgctggtccgacttcagaagcctatatcttttgatctacaaggaattttgagatgattcaaaaacgacaattgtaccccttactgtctagtttccagaaaagtaaaaacatcattatttagacatatgtagagaaagttagggccaaaatactaaagcctggcaatgtagccaccaaaaaatacggccgcaccggtttttcgcgaccgcaggacctgggaggcgcggtcaagcttggaattttgtggaccgcatagtgggagttcagagggtgcactatataaatgggatttagggcattatttcatatgttagacctagggagctcggtttgtggcgatgttttatgggtttttcatgaaattcatcggggtaagtgattctaactcgaatttggttaatatacatgaatatatcaatgatttcatcatctgattagtactttgaggtnnnnnnnnnnnnnnnnnnnnnnnnnnnnnnnnnnnnnnnnnnnnnnnnnnnnnnnnnnnnnnnnnnnnnnnnnnnnnnnnnnnnnnnnnnnnnnnnnnnnnnnnnnnnnnnnnnnnnnnnnnnnnnnnnnnnnnnnnnnnnnnnnnnnnnnnnnnnnnnnnnnnnnnnnnnnnnnnnnnnnnnnnnnnnnnnnnnnnnnnnnnnnnnnnnnnnnnnnnnnnnnnnnnnnnnnnnnnnnnnnnnnnnnnnnnnnnnnnnnnnnnnnnnnnnnnnnnnnnnnnnnnnnnnnnnnnnnnnnnnnnnnnnnnnnnnnnnnnnnnnnnnnnnnnnnnnnnnnnnnnnnnnnnnnnnnnnnnnnnnnnnnnnnnnnnnnnnnnnnnnnnnnnnnnnnnnnnnnnnnnnnnnnnnnnnnnnnnnnnnnnnnnnnnnnnnnnnnnnnnnnnnnnnnnnnnnnnnnnnnnnnnnnnnnnnnnnnnnnnnnnnnnnnnnnnnnnnnnnnnnnnnnnnnnnnnnnnnnnnnnnnnnnnnnnnnnnnnnnnnnnnnnnnnnnnnnnnnnnnnnnnnnnnnnnnnnnnnnnnnnnnnnnnnnnnnnnnnnnnnnnnnnnnnnnnnnnnnnnnnnnnnnnnnnnnnnnnnnnnnnnnnnnnnnnnnnnnnnnnnnnnnnnnnnnnnnnnnnnnnnnnnnnnnnnnnnnnnnnnnnnnnnnnnnnnnnnnnnnnnnnnnnnnnnnnnnnnnnnnnnnnnnnnnnnnnnnnnnnnnnnnnnnnnnnnnnnnnnnnnnnnnnnnnnnnnnnnnnnnnnnnnnnnnnnnnnnnnnnnnnnnnnnnnnnnnnnnnnnnnnnnnnnnnnnnnnnnnnnnnnnnnnnnnnnnnnnnnnnnnnnnnnnnnnnnnnnnnnnnnnnnnnnnnnnnnnnnnnnnnnnnnnnnnnnnnnnnnnnnnnnnnnnnnnnnnnnnnnnnnnnnnnnnnnnnnnnnnnnnnnnnnnnnnnnnnnnnnnnnnnnnnnnnnnnnnnnnnnnnnnnnnnnnnnnnnnnnnnnnnnnnnnnnnnnnnnnnnnnnnnnnnnnnnnnnnnnnnnnnnnnnnnnnnnnnnnnnnnnngaaaattgtagaaacttcataaagtaaatttttgggatttgaatgtcgattcgaagtcggatttgagtgaaactagtgtggttggactcgtgagtgaatgggtgttcataatttatgacttttaacaaattccgagtcgtgggctcggggggcgggtttgagccaatttcgggttttggtctaagtaggtagtttttcttgtggaatttattccattagcgtatattgatagtattgtactgattgtgaatggattcagagcatttggaggctgagtcgagaggcaagagcatcgcgaggtagagatttgaccggttagaggtaagtaacgattgtaaatctagtcctgagggtatgaaaccccaaaattttgtgtcatgtgattattttggaggtgacgcagatgctaggtcacaggcatgtgggcgtacaccgaggggattgtgactcggtcagtcccatgaaactgtaaagctgaataacttgttgatagttatgtgctctatatgtgttgtggaaacttgagtataagtcatgctagaaaccatgtttaggctttatgttggtattgttgggacccacagaggtcgtgtacatgtgaattatctgcttaaattattattttgtagtcagtcacaacttacttgattattttatctcagtctctattattcattattgatgtatcatatcattgttatttgggttgatcttatgattgtggagagccagggagactggagagctttataactgagtgaggccgagggcctgattgtgagttattatactatagcacgtgagttggccgtgcatcacgtgagttgttcgtgtagatcctaatattatactatagcacgtgagttggccgtgcagcatgtgagttggccgtgcggatctttatattatactatagcacatgagttggccgtgcggatccagatatttatattatggcatatgagttgtccgtggagcacgtgagttgtccatgcagattatagcgcttgggctgtaggatcccctccggagtctgtacagacccccaatgagcgcaggtacctactgaatgcgagtgccgagcactgagtgactgggaggcatgagtgaggtgaggtatgctcgagggactgtttacgagttattgtgaggtatgcctgaggggctgtatacgagtgactgtgaggtttgcccgaggggttgtatatgagtgatgttttgcccgaggggctctttatgatttcatcatttttgcttaccttgcattgagccttcgtttgaaaactgttgaaaaatatctttaaataattttactggaactgggtttaaacgagatgttttgattcaaaccctgattttaaaagcatgtggtattttactgagatttcatgatatgaannnnnnnnnnnnnnnnnnnnnnnnnnnnnnnnnnnnnnnnnnnnnnnnnnnnnnnnnnnnnnnnnnnnnnnnnncctttatttattgttgttacttagtgagttggcgtactcacattacttcctacaccttgtgtgtagatcaggtgtagctagacacggtagaggttgatgactattccggttgcagattttctcggtgatagcaaggtcgctgcatggcgatcgcagcgctactcttcttccttttatattcctttagttgtatttagctatttttagactatgttagtctcgatattgtcagataaattatagtagatgctcatgactagtgacaccccgatgtcgggctttttcgttttcgtacttttgttttgatttgaactcttttacaaaggtttttatgttagatagccttgaaattatctttgaaatgaaaatatcattttaatttggaaatgagtcggcttgcctagttccacgataggcgccatcacgatagggttagtttgggtcgtgacaagttggtatcagagcctaggtnnnnnnnnnnnnnnnnnnnnnnnnnnnnnnnnnnnnnnnnnnnnnnnnnnnnnnnnnnnnnnnnnnnnnnnnnnnnnnnnnnnntgacaaggtttagtagagttttgcggatcggtacggagacatctatacttatattcgagaggctgcagaacgcttagaaaaatttcactttcttgtattctgttgtgcgaagtttttgattccggagactaaatttctgttattctattctctcacagatggtgagaacacgtactaccggatcggacagtcagccaccagtgccaccagttagggcctcgagaggtcgaggccatggtagaggtcggggctgaggtaaagttcaaggtgtagctcagaccacagttggaccaacacctgtagtaccactagttgctccagctcagaagtggattccagatatagctgagccgacaggatcagctcagggacaagctgtgcccattgagattccaggccttcaggaaactttggcctagatattggcagcttgcactggtctggctcaggtggtttcgactcaggccgcacctgccacttctcaggccgggggaggtactcatacccctattgcccgtactccagaccaggtagtacatggacttcagataccgcgggcactaccagcccaaccgattgtagctgtgcaagccccggtagttcctgttatggcagatgatgagcagaggagacttgagagatttgagaggcttctacctctaccattactgagtcggaagatgctcagggttttctggataggtgtcaacggatgcttcggacaatgggtattctggagaccaatgggatctcattcactacttttcagttttctaggcctgcactccgatagtgggagactaacgagaggcgtagacctattggcgcaacacctcttacttggcagcagttctccgtggtctttttggagaagttcgtgcctcagtcccggagagaagagctgcgcagacagtttgagcagctttgccagggtgatatgtctgtaacgcagtacgagatgagattttctgagttggatcgtcaagcagtatggttggttcccactgctatggagaggattaggaggttcattgattgcctcacatatcagttgtagttacctatgactagggagagagtatctggtgctacttttgatgaggtagtggacattgctcaacagatagagatggttcgtagccaggaacgtggagagagagagacgcttagaggccctgtggtccaggtgattacagtggtgttccttcagggggtcagttttaccgcggtaggggtcgttcttacagacacgctcaaacagatcctccagttcatcgtggtgcatcagttagccacgggttttacaatgcacactcaggacagtctttattcagtgcactaccagcacagagctctcatcatgcttcgtccgctcaaacatcttcaggtaattcctcgggttatcaggagcagtagttctgttagaggagggtttgtttcgagtgcagaacatttggtcatttcaagagtgagtatcctaggttgttgagttgggctccagaatagattcctcgactgacggcaccagcaccagcagttcaaccacccgcccagccagcatggggtgggggtcaggcagctaggggtcgcccaagagagggaggccgatcaggtggcgggcaggctcgattcaatgcttttcctgccaggccagatgttgttgcctcagatacagtgatcacaagtattgtttcagtgtgccacagggaggcttctatattattttaccctagttccacttattcatatgtatcatcatatttttctcattatctggatatgccctgtgagtccttagttttacctgtttgtgtatctacaccggnnnnnnnnnnnnnnnnnnnnnnnnnnnnnnnnnnnnnnnnnnnnnnnnnnnnnnnnnnnnnnnnnnnnnnnnnnnnnnnnnnnnnnnnnnnnnnnnnnnnnnnnnnnnnnnnnnnnnnnnnnnnnnnnnnnnnnnnnnnnnnnnnnnnnnnnnnnnnnnnnnnnnnnnnnnnnnnnnnnnnnnnnnnnnnnnnnnnnnnnnnnnnnnnnnnnnnnnnnnnnnnnnnnnnnnnnnnnnnnnnnnnnnnnnnnnnnnnnnnnnnnnnnnnnnnnnnnnnnnnnnnnnnnnnnnnnnnnnnnnnnnnnnnnnnnnnnnnnnnnnnnnnnnnnnnnnnnnnnnnnnnnnnnnnnnnnnnnnnnnnnnnnnnnnnnnnnnnnnnnnnnnnnnnnnnnnnnnacgcaaaaatcgtgatgttgacgatgctagggttgccacaggtagaatggaggggttctctaaatcttgttcctagcagggtaatttcttattggaatgcccaacatatggttggaaagggatgcttgtcatatttgtcctttgtgagagatactgatgcagatactcttactattgattcagtaccggtcgtgcgagacttttcagatgtatttcctgcagacctgttaggtatgccacccgatagggatattgatttcggtattgacttggtgtagggcactcaacccatttctattcctttgtatcacatggcaccagctgagttaaaagaattgaaagagcaacttcaggaactccttaaaaaggggtttattaggcctagtgtgtcaccttggggtgnnnnnnnnnnnnnnnnnnnnnnnnnnnnnnnnnnnnnnnnnnnnnnnnnnnnnnnnnnnnnnnnnnnnnnnnnnnnnnnnnnnnnnnnnnnnnnnnnnnnnnnnnnnnnnnnnnnnnnnnnnnnnnnnnnnnnnnnnnnnnnnnnnnnnnnnnnnnnnnnnnnnnnnnnnnnnnnnnnnnnnnnnnnnnnnnnnnnnnnnnnnnnnnnnnnnnnnnnnnnnnnnnnnnnnnnnnnnnnnnnnnnnnnnnnnnnnnnnnnnnnnnnnnnnnnnnnnnnntggttctatttgtgaagaagaaggatggttccatgagaatgtgtattgactacaagcagttgaacaaggtcacagtcaaaaataagtatctcttgcctcgtattgatgatttattttaccagcttcagggagctagggtgttctccaagattgatttgaggtccggttatcaccagctgaagattcgggattcggatattcttaagacagctttcgggacccgttatggccattatgagttcttagtgatatcttttgggctgaccaatgccccaacaatattcatgcatttgatgaacagtgtgttccagccatatttggactccttcgtcattgtgttcattgatgacatcctcgtgtactctcgtagctaggaggagcacgctcagcatttgaggattgtattatagagattgagggaggaaaagctttatgcaaagttctccaagtgtgagttttggctcagttcagtagtattcttgtgacacgtggtgtccagtgagggtattcaggtggatccgaagaagatagaggcgttgcagagttggcctagaccatccttagccacaaagattaggagctttcttggtttggcggattattattgtcgctttgtggagggattctcatatattgcttcacccttgaccaaattgacccagaagggtgctccattcaagtggtcgaatgagtgtgaggagagctttcagaagctcaagactgcatggaccatagctccagtgttagttctgccatcagattcaggttcttataccgtgtattgtgatgcctcgagggtaggcattggttgtgttttggtgcaggagggtagggtgattgcctatgcctcgcgtcagttgaagacccatgagaagaattatctagtacatgatcttgagttaacagccattgttcacgccttaaagatttggcgtcattatttgtatggggttcattgtgagatttatactgatcaccaaagtctgcaacatctgtttaagtagaaggatcttaatttacatcagcggagatggttagagctacttaaagactatgatatcactattctgtaccatccagggaaggccaatgtggtggccaatgctttgagtcgcctggcagagtgtttggggagtttatcatatctcccagcagtagagagacctttggcattggatgttcaggccttagcgggccagcttgtgataatggatattttggagcctagtcgggtattggcttgcgtggtctccaagtcttctctttatgaccgtatcagggagcgtcagtatgatgacccccacttactcgttcttcaggacagggttcggagatgtgatgttagggatgtgactattagtgatgacggcgtgttgaggatgcatggccggatatgtgtgcctaatgtagatgggctttgggagctgattcttgtggaggcccacagcttgtagtattccatccatccgggtgccacaaagatgcaccaggatttgagacaacactattggtggaggtggatgaagaaggatatagttgggtttgtggctcggtgtctcaactgtcagtaggttaagtatgaacatcagagaccgggtggcttgtttcagagattagagatcccagagtggaagtgggagcggattaccatgtactttgtagttgggctcccatggacttcgaggaagttcgatgctatttgggttattatggatcggctaaccaagttcgcgcacttcattccagttggcactacttactcttcagagcggttggctgagatttacatccgagagattgtttgcctgcatggtgtcccagtttccattatttcagatagaggtactcaatttacatcgctgttttggagggccgtgcagtgagagttgggtactcaggttgagttgagcataacttttcaccctcaaatagacgggcagtacgaacgcactattcagatattagaggacatgttgcgcgcttgtgtcattgactttgggggttcatgggaccagtttctaccactcgcagagtttgcatataacaacagttaccagtcgagtattcagatggctccgtacgaggctttatatgggatgagatgtagaactctggttggatggtttgagccgggtgagtaggctcttgggtacagacttggtccaggatgcattagataaggtgaaattgattcaggagcggcttcgcacggctcagtctaggcagaagagctatgcggacaggaaggtctgtgatgtatctttcatggttggggagaaggttttgctgaaggtatcacccatgannnnnnnnnnnnnnnnnnnnnnnnnnnnnnnnnnnnnnnnnnnnnnnnnnnnnnnnnnnnnnnnnnnnnnnnnnnnnnnnnnnnnnnnnnnnnnnnnnnnnnnnnnnnnnnnnnnnnnnnnnnnnnnnnnnnnnnnnnnnnnnnnnnnnnnnnnnnnnnnnnnnnnnnnnnnnnnnnnnnnnnnnnnnnnnnnnnnnnnnnnnnnnnnnnnnnnnnnnnnnnnnnnnnnnnnnnnnnnnnnnnnnnnnnnnnnnnnnnnnnnnnnnnnnnnnnnnnnnnnnnnnnnnnnnnnnnnnnnnnnnnnnnnnnnnnnnnnnnnnnnnnnnnnnnnnnnnnnnnnnnnnnnnnnnnnnnnnnnnnnnnnnnnnnnnnnnnnnnnnnnnnnnnnnnnnnnnnnnnnnnnnnnnnnnnnnnnnnnnnnnnnnnnnnnnnnnnnnnnnnnnnnnnnnnnnnnnnnnnnnnnnnnnnnnnnnnnnnnnnnnnnnnnnnnnnnnnnnnnnnnnnnnnnnnnnnnnnnnnnnnnnnnnnnnnnnnnnnnnnnnnnnnnnnnnnnnnnnnnnnnnnnnnnnnnnnnnnnnnnnnnnnnnnnnnnnnnnnnnnnnnnnnnnnnnnnnnnnnnnnnnnnnnnnnnnnnnnnnnnnnnnnnnnnnnnnnnnnnnnnnnnnnnnnnnnnnnnnnnnnnnnnnnnnnnnnnnnnnnnnnnnnnnnnnnnnnnnnnnnnnnnnnnnnnnnnnnnnnnnnnnnnnnnnnnnnnnnnnnnnnnnnnnnnnnnnnnnnnnnnnnnnnnnnnnnnnnnnnnnnnnnnnnnnnnnnnnnnnnnnnnnnnnnnnnnnnnnnnnnnnnnnnnnnnnnnnnnnnnnnnnnnnnnnnnnnnnnnnnnnnnnnnnnnnnnnnnnnnnnnnnnnnnnnnnnnnnnnnnnnnnnnnnnnnnnnnnnnnnnnnnnnnnnnnnnnnnnnnnnnnnnnnnnnnnnnnnnnnnnnnnnnnnnnnnnnnnnnnnnnnnnnnnnnnnnnnnnnnnnnnnnnnnnnnnnnnnnnnnnnnnnnnnnnnnnnnnnnnnnnnnnnnnnnnnnnnnnnnnnnnnnnnnnnnnnnnnnnnnnnnnnnnnnnnnnnnnnnnnnnnnnnnnnnnnnnnnnnnnnnnnnnnnnnnnnnnaccttttgaggtgccttataggatagaggagatggcttagaagcttgccttgccacccagcttgtcgagtgtgcacccagtgtttcatgtttccatgctctagaagtatattggagatatgtcccatgttttggattttatcacggttcaattggaggctgatatgacttatgatgtggagccggtggccagttagatcggcaggtccgaaagttgatgtcaaaggacatagcttcagtgaaggtgcagtggagaggccagcccgtggaggaggccacctgggagactgagcgggagatacggagtagatatccacacctattcgagactccaggtatgtttctagactcattcgaggacgaacgtttgtttaagagggggaggatgtgatgacccagccggtcgttccgagagttatagccctgtttcccccattactgcttctttatgtgttgttcagctgtgttgtgttgtatcgggttggtaggttcgggtctggagtagtttcggagtggaatgagacactcagcctcttatttagaaagttaagttagaaaagtcaaccagatgttgacttatgagaaaatgatctcggattgggatttttgtggtatggatagctccgttaagtgattttggacttaggagcgtgttcgaaatgtaatttcgaggtccgtggtagaattaggcttgaattggcgaaattagaaatttggtgatttccggtcggcaatggaaaatttgacatcggagtcgaaatagaatttcgagagttggattagattcgtagtgtcatttgtgatgtgtgtgcaatatttgaggttattcagactaggtttgataggtttcggcatcggttgtggaagtttgaggtttcaactccattaagcttgaattggtgtgtgattcatgtttttgttattgtttgatgtgattcgagagctcgattgagtttgtatggaattttaggacttgatggtacctttggttgaggttccagaggcctagggtgtgtttcggggtgaggtttgagcgagtccgggcatttcaggaactcaggtatggttctagtgcattgaatttcgcgaacctcagcagaatttcgcggacctcataattctgccgcgggtgcactctagggaaaagttctgcagattcattggtccgacttcggacgcctatatcttttgatctacaagaaattttgagatgattcaaaaatgacagttgtagcccttcgtgtctagtttccagaaaagtaaagaagtcatcatttagacatttgtagaaaaggttatatccaaaatactaaagcctggtagtgcagccaccaaaaaatgctgccgcaggacctgagaggcgcggctgcgcttggaatttcacggaccgcatagtggaagttcagagggtgcactatataaatggggtttagggcattatttcacattttggacctagggagctcggtttgtggcgatatttcatgggtttttcaagaaattcatcgaggtaagtgattctaactcgaatttggttaatatacatgaatatatcaatgatttcatcatctaattagtactttgaggtggaaatttggggaaaattgtagaaacttcataaaataaatttttgggatttgaatgtcgattcgaagtcggatttgagtaaacctagtatggttggactcgtgagtgaatgggtgttcgtaatttttgacttttacccgattccgagtcgtgggccaggggggcgggtttgagccatttttggatttttggtctaaattggtagtttttcttgtggaatttattccattagcatatattgatggtattgtactcattgtgaatagattcagagcatttggaggctgagtcgagacgcaagagcatcgtggggtagagatttgaccggatctaggtaagtagcgattgtaaatctagtcctgagggtatgaaaccccgaaattttgtgtcatgtgattattttggaggtgactcacatgctaggtgataggtgtgtgggcgtgcaccgaggggattgtgacttggtccgtcccgtgaaaaatgtaaagctaagtaacttgttgatagttatgtgctctatatgtgttgtgaaacttgactataagtcatgctagaaaccatgtttaggctatatgttggtattgttgggaaccacagaggtcgtgtacatatgaattatcttcttaaattgttgttttgtacttagtcacaacttacttgattattttatctcagtctctattattcattattgatatatcatatcattgttatttgggatgatcttatgaatgtggagagcccggtagactggagagctttatgactaagtgaggctgagtgcctgattgtgagtcattatactatagcaggtgaattggccgtgcatcatgtgagttgttcgtgcggatccttatattatactatagcacgtgagttggctgtgcagcacgtgagttggccgtacagatccttatattatactatagcacatgtgttggccgtgctaatcgagatatttatattatggcacgtgagttgtccgtgcagcacgtgagttgtccgtgcagattatagcgcttaggttgtaggagcccctccgtagtctgtacacacccccaatgagcacaggtacctactgagtgcgagtaccgagttccgagtgccgagtgctgagtgactggaaggcataagtggtggtaaggttaggggctttttacgagggattgtgaggtatgcccgaggggctatgtacgaatgactgtgaggtttgcccgaggggttgtatatgagtgatgttttgcccgaggggctgtttatgatttcatcatttttgcttaccttgcgttgagcctttttttgaaaactgttgaaaaatatctttaaatgattttactggaactgagtttaaatgagatgttttgattcaaatcctgattttaaaagcatgtggaattttactgagatttcgtgatatgaactttatatgcttattgctcgccactactgctcagtctttatttattgttgttacttactgagttggcgtactcatgttactccctgcaccttgtgtgcagatccaagtgtagctggacacgatagcggttgttgactattccgattgcagattttctcggggatagcaaggtagctgcctggcgatcgcagcctttttcttctccctcttatcttcctttagttgtatttatctattttccagactatgttagtctcgatattgtcagataaattgtagtagattctcatgataagtgacaccccgatgtcgggctttttcttttccgcacttttgttttgatttgaactcctttacgaaggtttttatgttagatagccttgaaattatctttgaaatgaaaatatcggtttgttttggaaannnnnnnnnnnnnnnnnnnnnnnnnnnnnnnnnnnnnnnnnnnnnnnnnnnnnnnnnnnnnnnnnnnnnnnnnnnnnnnnnnnnnnnnnnnnnnnnnnnnnnnnnnnnnnnnnnnnnnnnnnnnnnnnnnnnnnnnnnnnnnnnnnnnnnnnnnnnnnnnnnnnnnnnnnnnnnnnnnnnnnnnnnnnnnnnnnnnnnnnnnnnnnnnnnnnnnnnnnnnnnnnnnnnnnnnnnnnnnnnnnnnnnnnnnnnnnnnnnnnnnnnnnnnnnnnnnnnnnnnnnnnnnnnnnnnnnnnnnnnnnnnnnnnnnnnnnnnnnnnnnnnnnnnnnnnnnnnnnnnnnnnnnnnnnnnnnnnnnnnnnnnnnnnnnnnnnnnnnnnnnnnnnnnnnnnnnnnnnnnnnnnnnnnnnnnnnnnnnnnnnnnnnnnnnnnnnnnnnnnnnnnnnnnnnnnnnnnnnnnnnnnnnnnnnnnnnnnnnnnnnnnnnnnnnnnnnnnnnnnnnnnnnnnnnnnnnnnnnnnnnnnnnnnnnnnnnnnnnnnnnnnnnnnnnnnnnnnnnnnnnnnnnnnnnnnnnnnnnnnnnnnnnnnnnnnnnnnnnnnnnnnnnnnnnnnnnnnnnnnnnnnnnnnnnnnnnnnnnnnnnnnnnnnnnnnnnnnnnnnnnnnnnnnnnnnnnnnnnnnnnnnnnnnnnnnnnnnnnnnnnnnnnnnnnnnnnnnnnnnnnnnnnnnnnnnnnnnnnnnnnnnnnnnnnnnnnnnnagcttgcctagttccacgataggcgtcatcacgacagggttagtttgggtcgtgacatttagtaagtaagtagtctaagcatggaaaacaagatcaaagtatgcaataaactacaagaaacaagtcccacccgcatgctttaacccgacaacaacgcataagtactcgtcacctcacatatacgttgtacccaacatctaaacatgtagcaaataggcaaacaagtcctaatccctcgagtcaaggttaaccacaacacttacctcgctccaaaggtccactcaaagctcaatcacaactttgcctttcaaacgagcctcagaaccaatagaatctagcaaattaccaaccaaacgattcaaattaagccttatgaactacacatgattgcaaaggattcaatttaggtcattattgaaaaagttaactcccgggcccgcttggtccaatcccaaagttcggaccaaaccctaattatccattcacccccgagcctgattatgtaatttgttttggaatcccacctcaatttgaggtctaaatccccaatttaccaaatccctaatttctacccaaaaacccccaattccaccatggaaaccttagattttaggttgaaatcttagaaaaagtagtgaaatattgaaaggaaataggttagaatcacttaccaatgatttggggaagaaagagtcttggaaaaatcgcctctaaggttttaggttttgaaaatttgaagaatggaccaaaaatcttgtctaagtcatattttgtttagttgcagatgtcgcatttgcgacgtgggcttcgcaaatgcaaagcccgcaaatgcgagaaatccatcacatttgtgaagactcccatacctctgcaatcatcgcatttgcgatgaaaagttcgcaaatataaacactgacttgaccgcaaatgcgacccaatgatcgcgaatgcgaagaatctccctccccagctcccatcgcaaatgcgaagctttgttcgcaaatgcggacactggactttcacaaatgcaaacccgtgatcgcaaatgcaacctcatgatcgcaaatgcgaacctaggctgacccaggcacacttcgcaaatgcgaagaaatggctcgcaaatgcgagcctgacagaagttggaaatgttcgcaaatgcgagatcagaggccagttccaagaaattggagaccccagcaaatgttctaaatccaaattccactctgttgcctatccgaaactcacccgagccctcggggctctaaaccaatcatgcacagaagtctaaaaatatcatacaaacttgctcgcgcgatcaaaccaccaaaataacacctagaactatgaatcggacactaaaatcaaatgaaattttcaagaacttttgaattgctatattaacaaccggatgtctgaatcaagtcaaaccaactatgtttctcaccaaatttgacaaacatgtcataaatatagtattggacctataccgggtttcgaaaccaaaatacggacccgatatctaaaaattcaaacatcggtcaaacatttcaaaattattaagcctttaactttcaaatttcaacaaagtccgataactcgggctacagactttcgaacttgattccagacatacgcccatgtcctaaatcacgatacagacccaacgggatcgtcaaaatacgaatccgggtccttttgctcaaaacattgaccgaagtcaattcaaatagattttaaggcaaaagaaattcatattttcttagttttttttcttttcacataaaagcttttcggaaaaatactcggactgtgcatgcaaattgaggaaggctaaaatgaagtatttaagacttcagatcatagaattaggttttaaaacctaagatgacctatcaggtcatcacatgtgctgcctctgcttctgcaagcactgttcatgcacctgcagtgtcgcaggtgcgaaagaagtttcgcttatgcgagaaaaccagaaagctaccagcttcgcttctgcgatctcgcaggtgcgcagaaatgtctgttactatgagttcaagccagcctctacccagctcccattctagtcgcttttgcgatgatttcctcgcttctgcgatgaaacttccgcagaagcgaaagcatcagctgctgcctagaaattccaacagcttttcttcaagtccgaattgacccgttaaccttccaacatgtcccaaatataccaacatgtcccaaaatataatacaaacttagtcgaggcttcaaaccacgccaaagaatgccgaaattacgaatcatgtatcgaatcgaattatgagttttcaaatcatccaacttctatattttgcgccgaaacgtatcaaatcaattccgattgacctcaaattttgcacacaagtcataaataacataacggatctataaaaattttcagaattggattacgactccgatatcaaaaagttaactccccggtcaaacttcccaaaaattcaactttcgccatttcaagcaaaatttcactacggacttccaaaaaatttttggacacggtccaaagtccaaaatcaccatatggagctattggaatcatcaaatttccattccggggtcgtttgctctaaagtcaactttccgatcaactctttccatttaagcttcaaaaatgagaattgttctttaaattaaattctgaatcttccgaaaatcaaactcgacaacacacacgggtcataatacatattacgaagcttctcgagaccttaagtcgcttaacgatgcataaattcttaaaaccacaagttgggtcgttatattcttcctcctcttaaaatatacattcgtcctcgaacgtgccaagaattattctgaggacattaaattactgaatgtatccttacacacatactcgtgggtgattctatgtccctacaatttaacttgggttcgacaacaccgtctcagttgagattattccttctaccctcatttataaactttaaatccaattccttacactctaattaatttcaaaaggcctaattttccatattaacacactgtgttagtctgaaccggcgatagaaattttgtgcctacacacacactatacgtatgcccataatcacatctctggtcataatagttgtttataattaattccagcatcctcaattaatctgatattaactaaaatctcatttcaaatttaacactgacagtaacacgcgaggcatgaagacctcataattatttatccaaatcaacgagtcgcatttaacactacatgtgcactcaccttataggataaaacgcaatgtttacaacatgaatatggctaaatatgcacagaaacatataaaagaattatcaaatatgctaacatgcatcattccctattagtactatagtacaaattaaatttcacaaagggagaatttaaacacataaatcgtttttaccacaaggacctcgtccttatataacttccaccgcggcttgtagtccggtttaaatatttcatatcatataaaaatgtgaggatcttgtcctcaactctgaatcacaagtatttttcacattgtgccaactgaaaatttttcattacctttatttcttttttttaataaattccgtaaacaattttcacaacacataatgaatcccccataccaatagggcataaaattcataaaattgagatcgattattccgaaatcacatcaaaacccactatagagagtattagaaagtcaattttggacttatagtcctcaatgatgtaccaataaaaatgatagacatgggctaaccccatcgaatatcccaacagggataatgtataagtgattcacaaaattagctcacccataagcggagcataataggaggagtcgcctcaatatttagaaccaaatcaaattatggaaaaatattcttttataatagatcgggattatacctgtaatgacactatctggtgtagtggcctcagccacaccatagcaaatatatcaacgggctgggcgtcccactctagggtgctctttacccacctgtcctccacctctaaatggttgtgcacgtggggtagtaactgtattggggaccatagtctgagtgttctgataaaatccacccctcccaagtctaggataatctctcatgatgtgcctagtatcaccacactcataataacccctctgagatcgcggctgctcctgctgagcctgtgccgaataactagaatagccactttaagaattttgtgtcggtggtgtactataagaacttaccggagcaccccaagtaatctgatgtgcggactgtgttgatcaacttctcaagcctccgccataatcggtcatagctgaagagtaaaatccactaaaccctccagagcttcgagaccttttgacctctttagactctctttcctcacctagaacaccctcaatcctcattgcaatctccactacttgctcaaatggagtatcagtttgcagctctcgagccatgcatattttaagatcataatcgagcccctctatgaatctgcggactcgttctctaactgtaggaaccaagataggtgcatgacgggctaactcactgaacctgatagcatattctggcaccgtcatagtgccctgacgcaaccgttcaaactttgtgcgccatgcatctcagagagtctgggtaacaaactctttcaaaaacatctgtgaaaactgagcctaagtaggtggtattgcgtcggatggtctactttcttcatagacttgccactactaatacgctgctcctgacagctgaaatatggtaaaggaaactccgctcacttccagaatacccatggtgatgagaatacggtgacacttttctagaaatccctgggcatcctctgtatgtgccactgaaagtaggtggactatgcctcttaaacctctcaagtctcttttgttcttcttctgatgcctttggcctgacctcaggttgaaccggaataacatgttgtaccggtactatacccagaacctaaccaatgtgaactcgctgctctagagtacgagcggtaggagtctgagttactcccccaatctgtgaaatttttggcgcaatagagatcaatcccgactgatgtaatgtaccaaacatattcaagaactctgctaaagtctcccaaagtccgggggtaacaacatgtgcttctggtacctgtcccctaactgaagctactagcagctcctcaactgctgctctgacaggtgctctagtcgcggcacgcgcccttcctttgcctttacctcggctacgacctcttgcggccctggcagtatgtgcgggtgtctgctcagctgacccgatagtacgtgtcctcactctctgtgagagaatagagatacaaaggctcaaattcctcaatcaataaatccgcacgacaggaatgaaagaattggaaatttcctaacagttctgtagcctctcgaagataagtacagacgtctccatactgatccgcaagactctactaaactcgtttgtgacccgtagaagctattaacctggagctctgataccaacttttcacgacccaaaatcccaccacaggtgccgtgataacacttagtctctaagactatgtaagcagattataattacaattcaagccatttgtttttaaatagaaaccaaccacgaaaataattacaaacaacctcccaagactggtaatactgagttatgaactctaactgaatacatgaaatgatctcaaggatcgaaaactcaatactgtttgattaataattaacagtacaataaaatggaaaggctccaatggactatgatgaccaagcagctctaccttgaatccttgcgatcacactctaactctatccgagttcgatatttccaatacctaactctgcacaaaaatgtgcaaaagtatagtatgagtactccacagtcggtacccagtaagtatcaagactaacctcagtggagtagtgacgaggtacagtcaagacactcactagtctaataatctttgcaatacagtatacaaaaataataggaaagcaaataacaataatggcaacgctaatcaaccagtgatatacacaacagggcaacaagaacaccattaatattgcttaacaaataataagtacaagtacacccaattaatcaactccttcaaatataaatctttcgcctatatgtttctcaaataataatctttaggatataatactttccaaaaaatataattcagatttactcccttcaaataaatatctttcaaatataatcctttcaaataaatctctttcaaatataattccttcaaataaatctctttcaaatataattccttcaaataaatatcttttgaataaaagtcaccctgtgacacctcatttcaaaatcataaaatatgggtctcagcccactttcatatttctacgacacctcgtgcctatttctctatcacaaccgcacggataactcgcgtgtcaatatcatcatcatttaaccacgtcacctcgttcccacatttcatttcataatccgcatggcaatagccacaggctcccaatttcaacatagatcacactattatcaagtttacctaaacaacaagacaaattgcacaagatataaaaataaacatagggaaaataacaacatcacataaaaattaccaacgcaataactccacatcatcacatattatccctgacaataggcacccttatctctcctatagccacccttattactcctataatagcctcccttatccctccgcctcacaatatcaatagccacccttatcactcctatagccacccttatcacttcgtataatagccacccttatcactctgcccagacaatatcctaacatacataaccacagtgaaattctacccttatacccacataatatcaacagtgaaatactacccttatatcctcataataataactcaaatcacacaacaatttacacggaatattatcacgacaacacaacacatacaattcctatcacaattttcccaacaacgacaaccaattccaatgatatagtaaaatcaataaatttctcaaaaatagcccaaggctacacacaacatatataacacctcaaaacaatcaacaaagatagaaaatacttagtatagggcaacaccttcattaatccaaattcatggtaattatattagcacctcagtttaaacttatttcattaattatttgcagatgaaaaattcataatataattatttccaggaaatatcaaatcaacaaactcatggaattcacataaatattaaattaataatcacatcaaattgtcatataaaaacaaattcaacaaatgagaattaagacatgaaaaatagatgatttaataaatgccaacaattatccaatttactacacaataatgcctaagactttaacccaataaaatttgcacatataannnnnnnnnnnnnnnnnnnnnnnnnnnnnnnnnnnnnnnnnnnnnnnnnnnnnnnnnnnnnnnnnnnnnnnnnnnnnnnnnnnnnnnnnnnnnnnnnnnnnnnnnnnnnnnnnnnnnnnnnnnnnnnnnnnnnnnnnnnnnnnnnnnnnnnnnnnnnnnnnnnnnnnnnnnnnnnnnnnnnnnnnnnnnnnnnnnnnnnnnnnnnnnnnnnnnnnnnnnnnnnnnnnnnnnnnnnnnnnnnnnnnnnnnnnnnnnnnnnnnnnnnnnnnnnnnnnnnnnnnnnnnnnnnnnnnnnnnnnnnnnnnnnnnnnnnnnnnnnnnnnnnnnnnnnnnnnnnnnnnnnnnnnnnnnnnnnnnnnnnnnnnnnnnnnnnnnnnnnnnnnnnnnnnnnnnnnnnnnnnnnnnnnnnnnnnnnnnnnnnnnnnnnnnnnnnnnnnnnnnnnnnnnnnnnnnnnnnnnnnnnnnnnnnnnnnnnnnnnnnnnnnnnnnnnnnnnnnnnnnnnnnnnnnnnnnnnnnnnnnnnnnnnnnnnnnnnnnnnnnnnnnnnnnnnnnnnnnnnnnnnnnnnnnnnnnnnnnnnnnnnnnnnnnnnnnnnnnnnnnnnnnnnnnnnnnnnnnnnnnnnnnnnnnnnnnnnnnnnnnnnnnnnnnnnnnnnnnnnnnnnnnnnnnnnnnnnnnnagcgtacatggcttttcacctttcacaaatggcacataaaactcgatgcctaaggggtaatttcccccactcaaggttaggcaagatacttacttttttctttaaagttaggacgatattcaaaaattgtcttcattcttgaattaacctccgaacagctcaaatctatccaaattaattcaattaattcaatacaaattatagggattaattccatatgaaagtactatttttccaacaaaatccgaaatttaactcaaaaatttcctttagggcccacatcttggaatcagacgaaactcacaaaatccgacaacccattccgataagagttcaaccataccaattttatcaaattccgataacaaatcgatctccaaatattaaatattcgttattgaaacgttttccaaaaatcttgtttttcttccaattacatacgaattaaacgatgaatatcaccatggatttatgaaatataatcactttcggatataggacacttacccgagtcaaagtcatgaataactcatcaaaaattgcccaaaccccaagctccaaaatctcaatcgaaaatggcaaagtgactgatttttggtccctatgtttctgccaagtttcgcacctgtaggcagatttgtcgcacctgcgagctcgcttatgcgagaattgtccacgcttctgctagcactgttcatgcacctgcggtgtcgcacgtgcgaaagaatttttgcttctgcgagaaaaccagcaagctgccatcttcgcttctgcgttcttacttgcgcttctccgattttgcaggtgcgcagaaatgtacgcttttgcgagttcaagccagcctctgcctagctccctttccagttgcttctgcgatgaaagtttcgcaaaggatcagctgctgcccagaaattccagcagcttttgttcaagtccgaattgatccattaaccttatgaaatccactcgaggctctcgggaccttaactaaatataccaacttatcccaaaatacaatataaactttattctgactccgatatcaaaaagtcaactccccggtcaaacttcccaaaagttcaactttcgccatttcaagcaaaatttcactacacacttccaaaataattttcggacacgctcctaagtccaaaatcacaatacggagctactggaatcatcaaaattacattccgggatcgtttactcaaaagtcaactctccggtcaaactctttccatttaaggttcaaaaataagaattgtcctttaaattaaattctgaatcttccgatcaaaaactcgagatttagatcatatatcgcaccttagttgtgattgagttttgtagcatatggcgttgtcggtccttccaaggatggtattatgcacttagcatgcttgtgtccgatgatcggatattttgtaagtaatgagcattctatctcggtaagtattttcttatagattcatttttgtgcggatcgggttgcacgccgcaacagtgtgatgttgagtacagttccctatattatattttgtgtgtttttgtgtcccattttctggggaaggttcatgactttagtttagttgtttaattagtcacatgggttgagtaatccttaccatagtctgtttttcttatgtatcgcaatcgagtccgtagcttattagctcattatggcgtcatatgagactttttgtcatgtctgaggtggcttattgcctgagcatcttatactaagtgagacgaggttattgtatccaggatcagtacgatcagattatatgaagtataataaagagaaaataccattatttggtccataatgaggcaatggttcttgtcagaaggagaaactcaatattttgttgactcggcagctggttatgaatttctacacatttcttccatcgtggaagcagttcaagagtttgaacaggaattataggtatcatgaggtgtgttgtgaacatcagatttgtggaattttggctatcattatcggaggatgttattatagtcatgtgaatgatgtggtgcatggtctaaattcaacaaaggtatgcaatcatgtattggtgtatcgtgtagtgattgatacgacattcataggttgaaaacggacatggtagagaaatctggatgttagaattgggctctaaggctaattagcctaaataaaggggaaaattttcagattggctcaagttaatgtgctcaactgggtgtggtagcatgggtagggcacgaaatgttaaacattaattttggataactctgaaacactccttagcatgttcgaggacgaatgtatgtttaagtgggagagattgtaatgacccaatcagtcgtttcgacttttagaacctcgttcccctatataaaactttccatatgtgctttaatgatttatgacttgcggggatggttggttcgggatttggaagtgtttgggttgaaatcggaacacttggttccttaagttnnnnnnnnnnnnnnnnnnnnnnnnnnnnnnnnnnnnnnnnnnnnnnnnnnnnnnnnnnnnnnnnnaaaaaggccaagtttgactttggtcaatattttgagcaaacggactcggattagtgttttgatagtttcggtaggtccgtatcgtgatttgggacttggacgtatgcccggaatcaaattccgaggtccctagcccgagatatggaattttgatgaaaaattaaaagttcaagttcaaatagtgaccagatgtctaattatgtgcaaatgaccccgaaatagaattttgatgattccaacagctctgtatagtaattttggacttacgagcgtgttcgaaattttatttgaaagtccgtagttaaattaggcttgaaatggctaaaaacaagaatttaagcttggaagtttgaccgaggagttgactttttgaaaccggagtcagaatccagttccgaaaactttcatagctctgttatttcatttatgacttgtgtgtaaaatttgaggtcaatcggagttgatttggtaggttttgacatcgaatgtagaagtttgaaattttaagtttcattaagcttgaatgtgagcataattcatggttttagtgtcgttttatgtgatttgaggttttaaataagttcgtatgatgttttaggacttgtttgaatattttgttgaggtctcgagggcctcgggtgagtttcagatggttaacggatcaaaagttagacttaaaacagctgctgcaattttttctttctgctggaaattctggcccaaaatcgaggcccaaaatcgagctcccaaaatcgagacccatgatcaaagccacgatcaaggacgaggatcgaagccactatcgaggccgaggatcgaggccacgatcgaggcgaggatcgaggccatgatcgaggccgaggatcgaggccatggatcgagggctgcctgggcagaattataaaagaggccattcatctcattcgctatttttagcaaattggagcttgagtagaggcgatttttgatagattttcaaggaaaagacattggggtaagtgattctaacttggatttggtctataaacataaatatatcattgttctcatcatttaattagtgttttgagattgaaatttgggaaatttttaaaaatctcatagaaatgaatttttgggatttcggtatcgattcggagtcggatttgagtgaaaatggtatggttggacccgtaatttaatgggttatcggatttcataacttttgccagatttcgagacgtgggccccacggacgaatttttaattaattttgggattttattgaaaatgtagtattttcttatagaattgattcctataaattttaatgattgtatcgaattattttggctagattcgagccagacatagttggataatcgaggaaagggtctactagtggattaaattggagcaagacgaggtaagtctcttgtctaatcttgtgagggggaaattaccccatagggattaaattgaataattgctgctaattgtgggggctacgtacacacgagataacgagagtccgtgcgtagctactataaatgctaaagcccgggtagtttaagactcaaagcatgagttacttgtgtaaattgtattccgtgattaattaatattaaattgatatatatgaatatattgtgaattgttagataaagatattaaaggatgaaaatcttatatgcttgattttctatttaaatcaattaattgttaaaaaaaattgtccttccttccgaatttatctcataataaatatactctccttccggaggtacataaaacaatgtcctcctttcttgtggagcggaccgaatgcctcggcaggatagatgcatctcaggatcgcgccgcacgtccctcggcagtgtacacgacactctggatcgggctgcacatcctcggcagaaatcgtgcttaataataataattatacgatactttaatagtttatttctgcttgcgaagctaattgataaattggaaaattcttagaatttaatgaattattattcttgcttgttaaagaattaattgttattcctataaatgatatttaattgataaattagaaatttatttgaattgaaggaatttaattaatatctagagaattgttgcatttgaaggaatttgatcatttccaccgattaaataaattgtttaaaattttgtaaattatgctgatttaaataccctagttgtatttcaattattattattgacccatagtgagtgtcaaagtcggccatctcgtctctaccacttcgagattaggcttgatactnnnnnnnnnnnnnnnnnnnnnnnnnnnnnnnnnnnnnnnnnnnnnnnnnnnnnnnnnnnnnnnnnnnnnnnnnnnnnnnnnnnnnnnnnnnnnnnnnnnnnnnnnnnnnnnnnnnnnnnnnnnnnnnnnnnnnnnnnnnnnnnnnnnnatacatatatgtatagcggccttgtgggcatagaggtgtggttaataattgtgggggcataggtgagctgcattctatattacgatccgcacctaacagagtctccttcggagttattatattttcctgtctaatttgtattctggacagatgctgtattttatttttaattccctagtaaatgctcatgcacttgtgacacccggttttgggaatagttgtgaattgtttagaaatttagctgtaaaaatatttatcatttactctatgagttttatctctacaagtttattaaagaaaatttttatttcaaaaatactaaaatgggtaattaagttaattgattatggttggctttcctgacagtagtgtccggcgccatcacggcctttttggattttgggtcatgacacgccgtatccgggagcacctggatctgcacacgaggtgcagagtgtagtatgagtacatctaactcaataagtaacaagattaacctgtgggttgaaagcaatgacgagctccgcaggtacagtccagtataaataatggtacaaaaatgtaggcatgctttcaagtttaacagttaaactcagtacaagtgaaatagatcaatattgcatgatataaggtatatgccatctcactagaaaaacctcatgtaaatactggtcacaaattatccggtcactcggtactgtttatggccaatccagccgaggggtgttccaacccgtatatataaatacacatcgactaacagtcagtcacccagtaccgtataagaccaatccagccctgggataattttatccccaaatataactgatacagacaagatctatgtctaggtaaaatcattacaatacaaataagtaaggcaagtccatgccctgggagatccatcccgaatatatataatcatctacgctcactggggctgtacagactccggagggctccttcagtccannnnnnnnnnnnnnnnnnnnnnnnnnnnnnnnnnnnnnnnnnnnnnnnnnnnnnnnnnnnnnnnnnnnnnnnnnnnnnnnnnnnnnnnnngctggcagtctcgatccgtataataataaagccaataaggcatggtgcaggcgggcagccccaatctatttaataataaagccaataaggcctgctgcaggcgggcaaccccgatccataaaatagtaatatattaagccattatggcatgctgcgtcgtgcagctcaatcacataaatatcctcacaatggacaaatattactgagtatgaaatgtatatttttgaataattaattcaacaacaacacgaccccatgggtcccaaaatgttgacacgtagcctaaacatgatctttaataggagcctcagctcaatttctctaacacatggagaatgttcagataataacatgattcattaatctnnnnnnnnnnnnnnnnnnnnnnnnnnnnnnnnnnnnnnnnnnnnnnnnnnnnnnnnnnnnnnnnnnnnnnnnnnnnnnnnnnnnnnnnnnnagatttattcaagatataatttatatggtgcacgtccacatactcatcacctaacgtgtgtgtcacctccaaacaatttatatcatatcaaattcggtgattcatactcttagaaccaagtttagaagtgttacttacctcaaatcgtgtaacgttttactccgctatgcctttgccttgtgaattggcctccaaacgcctcgaatctagcaataattaattcgattcagtcaataaaatttattgaaattaatttcataagaaaatactaatctttcataaaaatctgaaatttagctcaaaattcgcccgtggggcccatgtctcagaactcgacaaaaattacaaaatcctcaagcccactcaaccacgagtctaaccataccaattttacttaattacgacatcaactcgaccgtcatcaaattaaaccaagagggttttcaaatctttccaacttaattcacccattaaatgttaaaacaaccatggattcaggtaatttgaccaataatgagttaagaacacttttcccaaacacccacgcaagaatctatccaaatatcgccttctaccgagctcccaattttattttgtgttatcaactcaaaactcccattttggaactttttattttgcccaaaaatgccttcatcgcgttcgcgaccatagcttcgcgttcgcgaagaacaaaaatatgctgccaagtccttcttcacgttcacgatgccttacgacctctgcccttcgcgttcgcgagacacgagccgcatccgcgaaggcttaacgccagacaggcccccagctccctttcctcttcgcgttcgcgtcagcccactcgcattcgcgtaggcttcccctatctcttcttcgcgttcgcgtctctttcacgcgtttgcgatgggtaaatcccaacagcccaaaatccttcttcgcgaatgcgtgaaacgtttcgcgttcgcgaagaacaataccagatatcagttccagcagttgcaaaataaggaaaaatgatctgaaaccatcccgtcttgtcacgccgcatgtgcaattatatatagtaacaatagcacgatagaaacctcatgcaaccccataaaaacaaccgcacggtaaaaacctcgtgcatcacaataataacaaccgcacggcagaaacctcgtgcatcacaaagtacaacaacaacaatggcaataatacaaagtacgacaagtaaatcaattcaagaactttaagtcacaaggaacggtagaaccaattcacaaggaataaccatagtaaagaatgctaggcgtaaagagaacagctcaacaagagaaaaactaatatggagcaacggtcccacaatatacatttcaacaacagggaaagctaacatgagtcaaataaatctaaataaaacaagtcgactaagatataggatatctaaacttcttttaaggttgaggaaatttctaaggatattcaacaattcaattaaggataactagcggaaagataatcataacctcaattaagactgaacaaattataggataagacaataataactccaaataaagataagcagttatgaaaagatagcatgacaatagaggaggtaaaatcttcagttaagtcaaataagagtcaaataggcaataagagtgaatcctgaaacaattaattctaattaaagcatgtagaggtgagactagtaaataggaacttaaatcatatcaagaacaacttcatactcggtaaatataaggacctaagaattataaaaggcaaacttttcacaaataagtccgagcacgcactcatcacctcgcgtacatggactacaatcaacatagaagactcaaatcctaagggaaaaatcccccacacaaggttaggcaagatacctacctcgaaccaagctcaaacaatcggtcacaatgcctttcccactaatatccgactccgaatggcccaaatctagcccaaacaattacatatcataaatacaactatattaggctaatcaaattaatgaaatcaagattttagtaaatatttcgaaattcatcctaaaaagccgacccgggcccatatctcagaatcgagtaaaaataaaaaaaatacgaacacccattcactcacgagtccaaccatataagaattactcaaatccgaccacaaatccccttacaaaattcgaaatctttattgaagaagttctttcaatattttccaatttcaaccccaaaaatccaaacttaaatggagaaaacaactatagattaatggaatacaaccaaaaatgagttaggaatcattaccccaaagcttcctctgaaaatccctcgannnnnnnnnnnnnnnnnnnnnnnnnnnnnnnnnnnnnnnnnnnnnnnnnnnnnnnnnnnnnnnnnnnnnnnnnnnnnnnnnnnnnnnnnnnnnnnnnnnnnnnnnnnnnnnnnnnnnnnnnnnnnnnnnnnnnnnnnnnnnnnnnnnnnnnnnnnnnnnnnnnnnnnnnnnnnnnnnnnnnnnnnnnnnnnnnnnnnnnnnnnnnnnnnnnnnnnnnnnnnnnnnnnnnnnnnnnnnnnnnnnnnnnnnnnnnnnnnnnnnnnnnnnnnnnnnnnnnnnnnnnnnnnnnnnnnnnnnnnnnnnnnnnnnnnnnnnnnnnnnnnnnnnnnnnnnnnnnnnnnnnnnnnnnnnnnnnnnnnnnnnnnnnnnnnnnnnnnnnnnnnnnnnnnnnnnnnnnnnnnnnnnnnnnnnnnnnnnnnnnnnnnnnnnnnnnnnnnnnnnnnnnnnnnnnnnnnnnnnnnnnnnnnnnnnnnnnnnnnnnnnnnnnnnnnnnnnnnnnnnnnnnnnnnnnnnnnnnnnnnnnnnnnnnnnnnnnnnnnnnnnnnnnnnnnnnnnnnnnnnnnnnnnnnnnnnnnnnnnnnnnnnnnnnnnnnnnnnnnnnnnnnnnnnnnnnnnnnnnnnnnnnnnnnnnnnnnnnnnnnnnnnnnnnnnnnnnnnnnnnnnnnnnnnnnnnnnnnnnnnnnnnnnnnnnnnnnnnnnnnnnnnnnnnnnnnnnnnnnnnnnnnnnnnnnnnnnnnnnnnnnnnnnnnnnnnnnnnnnnnnnnnnnnnnnnnnnnnnnnnnnnnnnnnnnnnnnnnnnnnnnnnnnnnnnnnnnnnnnnnnnnnnnnnnnnnnnnnnnnnnnntcgccgaattcactcaagtccaaaatgaagaaatgaatcaaaccctcaatttggcccctcttctgccagttaaactgcatctgcggacctgccttcgcacatgcgtcaccgcacctgcggaattcccatcgcaggtgcggattccactcaaaactcagcgtccgcttctgtgatccaagggtcgcacctgcgtgtgcgcacctgcggacccatgtccgcttctgcggtccttcaccgctcctgcgattgctctatcgcatctgcgggcatcggagatgcggaatttacctcgcacctgcgacccctggcactcctccgcttttctgtttcggtgcttgcctctccacacgtgcgatcccgcacctgcggtctctccaccgcaggtgcggaaataccagatgcctgaagacttcagcaacaacacaatccaacttttgatccgttaagcacccgaaactcacccgaggcccccgggacctcaactaaacataccaaccaatcctaaaacgccatacgaacttagacgagccctcaaatcacatcaactaacgctaaaatcatgaatcactctccaattcaaacttaaagaacttgaaacctcaaacctacaaccgatgccgaaacatatcaaaccacatccgaatgacctcaaattttgcacacaagtcatattcaacattccagacctactccaacttttaaaatcagattccgaccccaatatcaaaaagttcactactggtcaaaattttcaaaaattcgactttcgccatttcaagcctaaataagctagggacctcaaattcacagaccagacacgattccaagttcaaaatcacccaacggagctaacggacccgacgaaactccattccggagtcgtctccacacagttccaattacgatcaaaatcctaagactaaagcttccgttttagggactaagtgtcccaaatcactctgaatcattcggtaactgaattcaaccacgcacgcagtcaatacacataatacgaagctgctcaggtccttatgccgccgaacgggatttaaattctcaaaatgacctgtcgggtcgttacatccttcccatcttaaacaaacattcgtcctcgaacgtgccaagaatcgcctcgaagttttcaagtcactgaaagcacatatccaacataaacccgcgggtggccccacgtcaccccaatccacataaacctgacgacaccatctcaactgtaatttatcctttctatcaacaccaataagccttagactcaaaattctcaccttccatttatcttcaaaagacccgattctaaatccataaccagtatcagtctcaaccagctgtaacaactcatgcctacacccacaaggtatgaccacacaacaagacataccacatataggcctataataacatttctgatcacagtagttgcctgtaaacaaacccagcaccgacaattagcctcatatccgttagaaccgtgttcaaacctccacaacactgacaacgatgcaagaaatatgaagacctcttaaatatacacccgaatcaacaagtcaaaactaacaccaccgggcacacgccccacaagctaaaactcaagaagcacataacgaaaatgactgaatacgtaaagagaaacacataagggaaatatcaaacaagcccgacaggtacaactctctaacagtaccatactacgaatcaatttaaataggaaaaatcaaattatatgaacaaatcataaggattttatcttggtataaccttccaccgcggcacgcagcccgaactcaaacatatcaaatcacatggagttgcgagggtctcaccctcaactccgaatcagaagtcgaatacacatcataccgatggaaatcttccactaattcaattctgccaataaaatcacaacacttgctaaactctcaccccggtagagtatcaaatcacaaatcgtaaccaatttactaaggaatcatatcaaacctgccagaatagacaacatgaattcacttctagtctcgtaactttcaataatgaattaaaataatgatagacatggctatcactcatagaatctcccaacaggggtaaacacctaagcataatactaagtcatgaactcacccataagtgggacaacaaataggggactcaccttaataagcagaactaaaacaaaatacgaatggtgcccctctatatcaaatcaaaaacatacttatatggcattatctgtcgcaacagcctcaagcctactataggaaacacatcaacgggtcgggccttcccctcttgggcgccctctactcgcctgaatactatgttgtgacacacccgtccggagtctaggacaatctctcaccctgtggctggtatctccacactcgaagcaaccactctgctgaagtggttgtgggaactgtgtggtacgggcaccctgagacacatgagcacctgaaacactgtgcgaagcctgaagtgcaaactgaactggctgacccacaaaacctcttccatgtcgtaccctgcctccaaaataaggaccaatagatctctcttgtctacgaggcctcctcacttctctgtcctcatgatctcgcttgtactctctctcatggccccgcctatcctctctcctgatcacacatgccctctatacgacgagcgatccctaccacttgctaaaacaaaaaatctgactctaactcccgagccatgttaaactgaatatcatgcctgagtccctcaatgaatctacggacacactctctaactgtggtgaccaaagcaggtgcatgcctggccatatcactgaatctcacggcatactctgacactgacatagtgccctagcgcagctgctcaaactctgtgcgccatgcatctcgaagggactgaggtacaaactctcttaggaacatctctgaaaactgaacccatgtaagtgaagctaagtcggctgggctacccaactcatatgcccgccaccactgataaaccgctcccctaacctggaacgtagtaaaagaaaccccgcttgtctctacaatacccatagtacggagaatgcgatggcactcctccaaaaaaccctgtgcactctctgaagccaaaccactgaatataggagggtcataattcctgaatattgcaagtctaagatgctcttcctcagatattgctgcccagcctatgggctgaactggaaccacaggctgtgttgccatgacacctggaacctaaccaacatgaactcgttgctttggggtgtgggcagcaggagtctgagttcctcccccggtctgtgaaatagttggtgcaaccggaatcaaccccgcctgagccaatgtaacaaacatgttcaggaattgtgctaaggtctcctgaaatccgggggtaacaccaggcacctccggtacctgctccccaactagaactactggcggctcctcaactgctgctctggtaggtgctgtggctgcggcacttactcctcgtcggcctctgcctctagcgatactttctctgggagcagcgccgtctataactgtagctcgtgtcctcactatctgtgagagaatggaatggtaaaagttcaaactccgagatcaataagctcgcacgataggaataaaagtattgagattgtcctaatagttctgtagcctttcgaagataagtacagacgtctccgtaccaatccgcaagactctactaaactcgcttatgactcgtagcacctataaacctaaagctctgataccaacttgtcacaaccaaatttttcctccgttgggtatcgtgatggtacctagtcttagggactaggtaagcctaacaataattgaaacaacaacattatttaaatagaatctcttcaattaccaaaactagtagtacaagtcataagctctacagagtgtttgctagaaagcctctaaatacaaccgtccagaaatagaaatcaacagtgcaaaacgaaaacttgaaggtgactctgaagcctgtgaacgcagcggtaggtttaccttgagtctccgcagcaacagtccacatagctagctaacgaacaatttcctgaatctacgtaaaaatgtgcagaagagtagcatgagcaaaccacagcggtgcccagtaagtatcaaggctaacctcggtagagtagtaacgaggaacagccaagacacccactggtctaaaatctccaaataaaacaagtcgactaagatgtaggatatctaaacttcttttaaggttgaggaaatttagaaggatattcaacaattcaattaaggataagcagcagaaagataatcataacctcaattaagactgaacaaattataggatgagataataataattccaaataaagataagcagttatgaaaagatagcatgacaatagaggaggtaaaatcttcagtcaaataagtcaaataggcaataagagtgaatatgaaaacaattgattctaattaaaacatgtagaggtgaaactagtaaataggaacttaaatcatatcaagaacaacttcatacttggtaaatataaggacttaagaatcctaaaaggccagcttttcacaaataagtctgagtacgcacatgtcacctcgcgtacatggactacaatcaacatagaagactcaaatcctaagggaaaaatcccccacacaaggttaggcaagatacttaccnnnnnnnnnnnnnnnnnnnnnnnnnnnnnnnnnnnnnnnnnnnnnnnnnnnnnnntgaatttcccacgaatatccgactccgaatggcccaaatctagcccaaacaattacatatcataaatacaactatattaggctaatcaattaatgaaatcaagattttagtaaaaattccgaaatccatccaaaaaagtcgactcgggcccacatctcggaatcgggtaaaaataacaaaatatgaacacccattcactcacgagtccaaccatataagaattactcaaatccgatcataaatcccctttcaaaactcgaaatctttattgaagaagttcttccaatttttcccaatttcaacaccaaaaatccgaaattaaatggagaaaacaactacagattaatggaatacaacaaaaaattatttaggaaacattaccccaaagcttcctctgaaactccctcgaagaattgccaaattccgtgctctcaagtccaaaaatgaagaaatgaatcaaaccctcgatttggcccattttccgctagttaaaccgcatatgcggacctgccttcgcacatgcgtcaccgcacctgcggaattcccatcgcaggtacggattccactcaaaactcagcatccgcttctgcgatccaagggtcgcacctgcgtgtgcgatcctgcggacccatgtccgcttctgcggtccttcaccgctcctgcgattgctccatcgcatctgcgggcatcgcagatgctgaatttacctcgcacttgtgacccctggcactcctccacttttccgcttctgcgcttgcctctccgcacgtgtgatcccgcatctgcggtctctccaccgcaggtgcgaaaatatcagatgccggaagacttcagcaggaacacaatccaacttttgattcgttaagcactcgaaactcacccgaggcccccgagacctcaactaaacataccaaccaatcctaaaccaccatacggacttagttgagccctcaaatcacatcaactaacgctaaaatcacgaatcaccctcccattcaaacttaaagaacttgaaacttcaaattcctacaaccggtgccgaaacctatcaaaccacgtctgaatgacctcaaattttgtacacaggtcatatttaacatttcggacctactccaacttccggaatcagattctgatccagatatcaaaaagtccactaccggtcaaaatctccaaaaattcgactttcgccatttcgagcctaaataagctagggacctcaaattcacagtccggacacccttctaagtccaaaatcacccaacggatctaatggaactgacaaaactccattatggcatagtcttcacacagttccgactacggtcaaaatcctaagacttaagcttctgttttagggactaagtgtcccaaatcactccgaatcatccggtaactgaattcaaccatgcacgcagtcaatacacataataggaagctgctcagatccttatgccaccgaacgagacttgaattctcaaaacgaccgaccgggtcgttatatttcccacactagtagaaaatatccagttcaaaccatggtagaaaccatcaagaacactttgaaatccatctacacataaccaagctgttagaactaaattcctctaactcgaccaaaccacataggtcatcaaaacccaagaatattgccaccaaaacatctatagagtctcaccacatcataattacccctataaatatcacaaccgaaacacccactctgaaaataccttatttgagtctaaggccgtttcattcaccttcctgataccgaaatataaaatccataatgatatacaaaaatgccacaagtctcgacaccatccaacttaaatctcagattttagccataaacaaatccgccaaaaattctcaattgttacatattaatctcgaatccattagaactttctcgagagtcaccccatttgttcaaatccacattacaccgccaaaatggaccaaaagacacgttccccatcagcacaacaatactcaaataagtaactctactttaatatcacctatcaaattcatactccgtgcacaatacatcattcacaaataacaactcactcatcccacgatttccatatactcataaagcacaatataacccatatccaaaagtttccttactcgagtcattctcgaactccacctctgcaagtcatctctgattcccaagtatacttcagaccaaataaaatgattttgacacataaccatgaattaaattgtcaatagcaggctcccccacttgtctcaaagctatagattaaaatatttgataactcataatacccatgctttattattgccttaagaccacagtcagttcaacgaaaattcttctcaagctcaagacacaccaaccaaaaaataccccaatcatccactaatctcgcattcattctcttaacactcaagtaaactttctcaaccagattcaaattcaagtctcaacacatacgccccgctggcagaaaagaaactctccattcacatcataaggaacacacctacatagattactccgcaggagataacccacatgcttagtctcaaattggcatcttgttataccctttcgcagccacaattactatgaaattacttaatctttctgagtccaaactcattaaccagacacgagaatttgatgttccccaaaatttaacaacgtgaaagatctttcaaaacattcacactcgagattatacgtcacataaaaatgaaaataaagtacccaatggccttcctttacatttcaaggaaacacttctcgtcacattcaaatcgtcttaacacatcccgcagttatatcatactcatcacaaagnnnnnnnnnnnnnnnnnnnnnnnnnnnnnnnnnnnnnnnnnnnnnnnnnnnnnnnnnnnnnnnnnnnnnnnnnnnnnnnnnnnnnnnnnnnnnnnnnnnnnnnnnnnnnnnnnnnnnnnnnnnngccataaattccactcatagggacattaccggacatatgagcccaattgtataggttacaactaaagctatcgagcctaagctacggtctaaacctggcctcaagtcctctagactggcccattaccaaaacacagaatacacacctcgaacctcgttcattgaatcacaagccagcgatgcacaactgatactgagcgcttacatgcgcacataaatgcatggaaggaattcaaagagttatgtttcaagctgaatcaattccgcacgatagaatacaagaaagtgaaattattcctaagggttcggcaacctctcgaagattagtacagacgtctctgtaccgatctgcaagaccctactaaacctgctcatgactcgtgagacctatgtaacctaaggctctgataccaactttttacgacccaaaatcatacctgtcatgatggcaccaatcgcaatactaggcaagccgaaaatctcaataaaccaccatatcttttaaatttgaaaacataataattaaattcagcggaagaaactcacaatttcaaatataacactcccaaaacccggtatcactgagtacatgagcatctaatatgaatataaagtctgactgataaaatcactgtctgaaaatatcgaacagtacaataattaaataggaagggaatcaagtctgtggacgtcaagcaactaccttgatagtccccaacagaattaacttcaaaatctagcagccttcgtatttgggagaacctggatctgcacacgaggtgcagagtgtagtatgaatacaactaactcaacagtaacaagactaacctctgggctgaaagcaatgacnnnnnnnnnnnnnnnnnnnnnnnnnnnnnnnnnnnnnnnnnnnnnnnnnnnnnnnnnnnnnnnnnnnnnnnnnnnnnnnnnnnnnnnnnnnnnnnnnnnnnnnnnnnnnnnnnnnnnnnnnnnnnnnnnnnnnnnnnnnnnnnnnnnnnnnnnnnnnngtttaatagttaaactcagtacatgtgaaaaaattcaatactgcatgatatgaggtatatgacatctcagtagaaaaacctcatgtaaatactggtcacaaattatccagtcactcggtactgtttatggacaatccagccgaggggtgttccaacccatatatatatacacatcgactaacagtcnnnnnnnnnnnnnnnnnnnnnnnnnnnnnnnnnnnnnnnnnnnnnnnnnnnnnnnnnnnnnnnnnnnnnnnnnnnnnnnnnnnnnnnnnnnnnnnnnnnnnnnnnnnnnnnnnnnnnnnnnnnnnnnnnnnnnnnnnnnnnnnnnnnnnnnnnnnnnnnnnnnnnnnnnnnnnnnnnnnnnnnnnnnnnnnnnnnnnnnnnnnnnnnnnnnnnnnnnnnnnnnnnnnnnnnnnnnnnnnnnnnnnnnnnnnnnnnnnnnnnnnnnnnnnnnnnnnnnnnnnnnnnnnnnnnnnnnnnnnnnnnnnnnnnnnnnnnnnnnnnnnnnnnnnnnnnnnnnnnnnnnnnnnnnnnnnnnnnnnnnnnnnnnnnnnnnnnnnnnnnnnnnnnnnnnnnnnnnnnnnnnnnnnnnnnnnnnnnnnnnnnnnnnnnnnnnnnnnnnnnnnnnnnnnnnnnnnnnnnnnnnnnnnnnnnnnnnnnnnnnnnnnnnnnnnnnnnnnnnnnnnnnnnnnnnnnnnnnnnnnnnnnnnnnnnnnnnnnnnnnnnnnnnnnnnnnnnnnnnnnnnnnnnnnnnnnnnnnnnnnnnnnnnnnnnnnnnnnnnnnnnnnnnnnnnnnnnnnnnnnnnnnnnnnnnnnnnnnnnnnnnnnnnnnnnnnnnnnnnnnnnnnnnnnnnnnnnnnnnnnnnnnnnnnnnnnnnnnnnnnnnnnnnnnnnnnnnnnnnnnnnnnnnnnnnnnnnnnnnnnnnnnnnnnnnnnnnnnnnnnnnnnnnnnnnnnnnnnnnnnnnnnnnnnnnnnnnnnnnnnnnnnnnnnnnnnnnnnnnnnnnnnnnnnnnnnnnnnnnnnnnnnnnnnnnnnnnnnnnnnnnnnnnnnnnnnnnnnnnnnnnnnnnnnnnnnnnnnnnnnnnnnnnnnnnnnnnnnnnnnnnnnnnnnnnnnnnnnnnnnnnnnnnnnnnnnnnnnnnnnnnnnnnnnnnnnnnnnnnnnnnnnnnnnnnnnnnnnnnnnnnnnnnnnnnnnnnnnnnnnnnnnnnnnnnnnnnnnnnnnnnnnnnnnnnnnnnnnnnnnnnnnnnnnnnnnnnnnnnnnnnnnnnnnnnnnnnnnnnnnnnnnnnnnnnnnnnnnnnnnnnnnnnnnnnnnnnnnnnnnnnnnnnnnnnnnnnnnnnnnnnnnnnnnnnnnnnnnnnnnnnnnnnnnnnnnnnnnnnnnnnnnnnnnnnnnnnnnnnnnnnnnnnnnnnnnnnnnnnnnnnnnnnnnnnnnnnnnnnnnnnnnnnnnnnnnnnnnnnnnnnnnnnnnnnnnnnnnnnnnnnnnnnnnnnnnnnnnnnnnnnnnnnnnnnnnnnnnnnnnnnnnnnnnnnnnnnnnnnnnnnnnnnnnnnnnnnnnnnnnnnnnnnnnnnnnnnnnnnnnnnnnnnnnnnnnnnnnnnnnnnnnnnnnnnnnnnnnnnnnnnnnnnnnnnnnnnnnnnnnnnnnnnnnnnnnnnnnnnnnnnnnnnnnnnnnnnnnnnnnnnnnnnnnnnnnnnnnnnnnnnnnnnnnnnnnnnnnnnnnnnnnnnnnnnnnnnnnnnnnnnnnnnnnnnnnnnnnnnnnnnnnnnnnnnnnnnnnnnnnnnnnnnnnnnnnnnnnnnnnnnnnnnnnnnnnnnnnnnnnnnnnnnnnnnnnnnnnnnnnnnnnnnnnnnnnnnnnnnnnnnnnnnnnnnnnnnnnnnnnnnnnnnnnnnnnnnnnnnnnnnnnnnnnnnnnnnnnnnnnnnnnnnnnnnnnnnnnnnnnnnnnnnnnnnnnnnnnnnnnnnnnnnnnnnnnnnnnnnnnnnnnnnnnnnnnnnnnnnnnnnnnnnnnnnnnnnnnnnnnnnnnnnnnnnnnnnnnnnnnnnnnnnnnnnnnnnnnnnnnnnnnnnnnnnnnnnnnnnnnnnnnnnnnnnnnnnnnnnnnnnnnnnnnnnnnnnnnnnnnnnnnnnnnnnnnnnnnnnnnnnnnnnnnnnnnnnnnnnnnnnnnnnnnnnnnnnnnnnnnnnnnnnnnnnnnnnnnnnnnnnnnnnnnnnnnnnnnnnnnnnnnnnnnnnnnnnnnnnnnnnnnnnnnnnnnnnnnnnnnnnnnnnnnnnnnnnnnnnnnnnnnnnnnnnnnnnnnnnnnnnnnnnnnnnnnnnnnnnnnnnnnnnnnnnnnnnnnnnnnnnnnnnnnnnnnnnnnnnnnnnnnnnnnnnnnnnnnnnnnnnnnnnnnnnnnnnnnnnnnnnnnnnnnnnnnnnnnnnnnnnnnnnnnnnnnnnnnnnnnnnnnnnnnnnnnnnnnnnnnnnnnnnnnnnnnnnnnnnnnnnnnnnnnnnnnnnnnnnnnnnnnnnnnnnnnnnnnnnnnnnnnnnnnnnnnnnnnnnnnnnnnnnnnnnnnnnnnnnnnnnnnnnnnnnnnnnnnnnnnnnnnnnnnnnnnnnnnnnnnnnnnnnnnnnnnnnnnnnnnnnnnnnnnnnnnnnnnnnnnnnnnnnnnnnnnnnnnnnnnnnnnnnnnnnnnnnnnnnnnnnnnnnnnnnnnnnnnnnnnnnnnnnnnnnnnnnnnnnnnnnnnnnnnnnnnnnnnnnnnnnnnnnnnnnnnnnnnnnnnnnnnnnnnnnnnnnnnnnnnnnnnnnnnnnnnnnnnnnnnnnnnnnnnnnnnnnnnnnnnnnnnnnnnnnnnnnnnnnnnnnnnnnnnnnnnnnnnnnnnnnnnnnnnnnnnnnnnnnnnnnnnnnnnnnnnnnnnnnnnnnnnnnnnnnnnnnnnnnnnnnnnnnnnnnnnnnnnnnnnnnnnnnnnnnnnnnnnnnnnnnnnnnnnnnnnnnnnnnnnnnnnnnnnnnnnnnnnnnnnnnnnnnatgggcaaccctgatccataaaatagtaatgtattaagccattatggcctgctgcgtcgcgcagctcaatcctataaatatcctcacaatggacaaacattactgagtgtgaaatgtatatttttgaataattaattcaacataaacacgaccccatgggtcccaaaatgttgacacgtagcctaaacatgatctttaataggagcctcagctcaatttctctaacacgtggagaatgttcagataataacatgattcattaatcnnnnnnnnnnnnnnnnnnnnnnnnnnnnnnnnnnnnnnnnnnnnnnnnnnnnnnnnnnnnnnnnnnnnnnnnnnnnnnnnnnnnnnnnnnnnnnnnnnnnnnnnnnnnnnnnnnnnnnnnnnnnnnnnnnnnnnnnnnnnnnnnnnnnnnnnnnnnnnnnnnnnnnnnnnnnnnnnnnnnnnnnnnnnnnnnnnnnnnnnnnnnnnnnnnnnnnnnnnnnnnnnnnnnnnnnnnnnnnnnnnnnnnnnnnnnnnnnnnnnnnnnnnnnnnnnnnnnnnnnnnnnnnnnnnnnnnnnnnnnnnnnnnnnnnnnnnnnnnnnnnnnnnnnnnnnnnnnnnnnnnnnnnnnnnnnnnnnnnnnnnnnnnnnnnnnnnnnnnnnnnnnnnnnnnnnnnnnnnnnnnnnnnnnnnnnnnnnnnnnnnnnnnnnnnnnnnnnnnnnnnnnnnnnnnnnnnnnnnnnnnnnnnnnnnnnnnnnnnnnnnnnnnnnnnnnnnnnnnnnnnnnnnnnnnnnnnnnnnnnnnnnnnnnnnnnnnnnnnnnnnnnnnnnnnnnntcaaggcacaatttatatggtgcacgtccacatgctcatcacctaacgggtgtgttacctccaaacaatttatatcatatcaaattcggtgattcataccctcagaaccaagtttagaagtattacttacctcaaatcgtgtaactctttactccgctatgcctttgccttgtgaattggcctccaaacgcctcgaatctagccacagttaattcgattcagtcactaaaatttattggaattaattccataagaaaatactaagttttcataaaaatctgaaatttagctcaaaaatcgctcgtgggacccacgtctcgaaacccgacaaaagttataaaatccgaaagcccattcaactacgagtctaaccataccaattttacttaattacgacatcaaatcgaccctcatcaaattaaaccaagagggttttcaaatctttccaatttaattcacccattaaatgttaaaaacaaccatggattcaggtaatttgaccaataatgagttaagaacacttaccccaaacacccatgcaagaatctctccaaatatcgccttctaccgagctcccaatttgattttgtgttatgaactcaaaacctctattttggaacttttaattctacctagaaatgctttcatcgcgttcgcgaccatagcttcgcgttcatgaagcttaaaaatgtgctgccaagtcctttttcttgttcgcgagctcttcatcgcgttcgcgatgccttccaacctctgcccttcacgttcgtgtgacacgagccgcatccgcgaaggcttaacgccagacaggccccaactccctttcctcttcgcgttcgcgtaggcttcccctgtctcctcttcgcgttcgcatctccttcacgcgctcgcaatgggtaaatcccagaagcccaaaatccttcttcacgaacacgtgagaccattcgcgttcgcggagaataataccagatatcacttccagcagttgcaaaacaaggaaaaatgatctgaaaccatcccggaactcacccgagcgcccgggacctcaaccaaacataccatcaagcccaaaatatcatacgaacttagtcgaatcctcaaatgacctcaaacaacgctaaaaccacaaatcatacccaattcaagcttaatgaactttgaaattttaaatttctatatcttgtgccgaaacacatcaaatcacgtccgattgacctcaaattttgtacacaagtcataaatgacataacagagttattccaattttcagaatcggatttcgaccctgatatcaaaaagtcaacaccccggtcaaactttcaaaaaattcaactttgggcatttcaagcctaattccactacggacctccaaaaatatttctggacacgctcctaagtccaaaatcaccatacagagctattggaatcatcataattaaattttgaggttgtttacacataagtcaatatccggtcaactttttcaacttaagttttcaattgtgagagtaagtgtctcatttcactccgaaatctttccggacctgaaccaactaacccgataagtcataaatcaattgtaaggtatcaattgagttgtaaattggggaacggggttataatactcaaaacgaccggccgggtcgttataatttttcgtcattgcaatacacaagcatacatgcaattatttctcgacgaattaaagaggttattattcattttttgcggtgaaagttgaattttggggataaacacatgcttgaaagcacatatatccatcattattgctacaaaataagaagattgaaagaaagattaactgcaataaatgaacaataacgccaaaagattaaattaaacatagtaacattcctgtggtgttttgatctttaactcttataattacgttttattgaagctaaacattttcatgtcaaattcttaaaaagaaaaatagttacgactgtgtatagatgattaggccaaaccaaattgtctgattaaaatgagcatgaaggagtcattgactaacttaactttgaagaaattattaggtttaatttttggtaaataatttttagttgaaattataatcttattaaataagaaatataaattttgcacaagaaataaagttataaaacttctacaattctacatgtaaactcacatataattaggacagtgcttgtatatataatatgacaagtcttttacgtgctcgtagaatttttctttgccaactctttttatataagtaattattataattttaatcaattatgaagttgtttcgttgaaggaagattgtatattttttaatggattgagttccaggagaaaaaagttacttagtcctaacccaaaattatatttatacccatcattaaattgctacataaaagaaaaattgactttaaagggcaaacaagtccatcaagtattcggggatattttcgtctcttaacatttagcatcctaacattcgtgcttttataataatatagatagatagatagattgatatatataaatatagatatagatagataaatataaataaatagatagatatagattgatgaataactaattttatgcgaatatttagcctaaagttggtataataaataaactgtccaaattgacgctactgaaattatgtatattcctcgatctaatataatgatgtaattttgtctgaatcacttataaaaatgagatattggcacgcgactactgtttgctgagaaagtgagcaacgaaacgatttgagggtttttctttagtctttattcttcaatttgttaatttgattcgtttatttgtttgattaaagcaacaagggaattttacctatatgtactataatagaaacttatttactctcactgtttaggttttaacttaattacaagttgataacaattacttttcagctctcttgttttaatttgtaaaaattgcacgggacgccctatttggtcactcccatttaatctatacccacattttaaattttttttaacttgtacccattttttaaacaacttcaggcttctttctcctcctccttctcctccttcgttttcttcttctcctcctcctcctcctcctccttcttcttcttcttcttcttcttctttttcttcttcttcgagtgacaatgattttatatggttgctgtgaatatattttaatgtagtttatgatatttttacaaaacaaaaattggttgcaaatgtcaatattttaccttttacaaaaaaaattggtttctcttcttcttttcatagtaaacattgtacatagttgggcagctaggtgaataagtgccggtgcaaacgttccattgaatctagagtgcttaatgtgagagatcaaaagtgatcgttcttttgtgactcataaaaatttgttgttcatttcttgcaaacatgtaagaacagtacagtgccaatttgaaatataatactactttaaggactaaatatctgttgatataatgtaaacatgcatattctatcttgcccgcttctggacatagcaatatcacagaaacagctgaaattagttccagttgctgcaatttaaatttgtaagagctcctaagaatgctgaaattcaacaaatataaacaaaaactccagctcctagaatgctgaaattcagcaaatataaaataaatttcaactcctataatgctgaagttcagcaattacaaaacaaaaagttcagctcctagaatgctgaagttcagcaattacaaaacaaaaactccagccaaaacatgatgtagttttattgaactgaagtttgtcattgcactatgaactgaaatttgcgtgattgcctttgcaagtgaggccaaacttcaggaaaaaatatctaaagttttgctttgacaaggctatacttcaggcaaaatattctgaagttcaaacttcagacataaatttttgctacttcaagcccgtatgtctgatgttatccgaaaaatgggcacgcttgcaatattttttgcaaagtgggtataagttaaaaggtgatccaaaaactgggtatagatgcaaatcccccttttaattttagtgtttgggcctacggttaacccaacccaatcctatgaggttgcaggctgagatggatatactaagagcccatttggattagctgattataaatagccgataagcttgaagtgctgaaaaatattttaagcgcttaaactgattttttaaataagcatttacgtgtttggatagacgtactaaaactgataataaacagttgatgtgtttggtagaaaagtgctgataagttgttcttttattaaaatgactacaatatcctttaaaagcttacaaaagataataaattaaaaagtttctttgtaaagaaaaagatgaacaacgaatatggaatgaaaagaaagttagaaaatttattttgaaaataatattttatgaattagaaaatattattaaggctaaactagtaaaagccttggtcaaactataagtgcttataaactaaaaaatcataagttggggtgaccaacttatgactgattttagcttataagcagtttgagtatttaccaaacgcatagataagccaaaaggtgtttataagtcaatttgacctacttataaacttagccaaacatcctctaaaaaccctcaattttaaataatgcaaatagcatggactaaccagttttcagactcgtaattaaagaatagctaacatttgcaaagtcattgagaagtagtcattatttaatgtgaagataaaatatggaaaaaataccatatctgaaatacagaaattttcaatataatatgttgaataatggagctcatacgtataaacttccagcatattatgttggaactccagcacattatgctggaatcttatgtgtaaaaaattcaaactccaacatattatgctagatttcttttcgtattttaaggatatttttgttcatgttttattttacatgaaaaaaatagttaaattttgattactttgaaactacggctaattttctattagcacatgtaaatcaggctgttttattttcctttttaaatgggctaaaaagccagcccaacccaatgtaattataccatgctaagttcagttggctcgataggtcaagttcattttgacaactttattaataacattaattataaaagtttgataaagtaacccttatctatttcttaaatgagtaactaatgtttatatttgtttatttttgaattagtgagggtggaactgaaaaaaaataaattaacgcaatcatgattttctaaagttattttgagcaaatctttttggcaagagtaacagattgtactgacattttgtttccaaatttaaagtgaaataaaaaaaaatcaatagaagaaggagaaggaaaaggccgtgtggaccagacaaaaggagaaccctgaataattaataattttactgttgattaattggctaatacaaaatcgtaaggccannnnnnnnnnnnnnnnnnnnnnnnnnnnnnnnnnnnnnnnnnnnnnnnnnnnnnnnnnnnnnnnnnnnnnnnnnnnnnnnnnnnnnnnnnnnnnnnnnnnnnnnnnnnnnnnnnnnnnnnnnnnnnnnnnnnnnnnnnnnnnnnnnnnnnnnnnnnnnnnnnnnnnnnnnnnnnnnnnnnnnnnnnnnnnnnnnnnnnnnnnnnnnnnnnnnnnnnnnnnnnnnnnnnnnnnnnnnnnnnnnnnnnnnnnnnnnnnnnnnnnnnnnnnnnnnnnnnnnnnnnnnnnnnnnnnnnnnnnnnnnnnnnnnnnnnnnnnnnnnnnnnnnnnnnnnnnnnnnnnnnnnnnnnnnnnnnnnnnnnnnnnnnnnnnnnnnnnnnnnnnnnnnnnnnnnnnnnnnnnnnnnnnnnnnnnnnnnnnnnnnnnnnnnnnnnnnnnnnnnnnnnnnnnnnnnnnnnnnnnnnnnnnnnnnnnnnnnnnnnnnnnnnnnnnnnnnnnnnnnnnnnnnnnnnnnnnnnnnnnnnnnnnnnnnnnnnnnnnnnnnnnnnnnnnnnnnnnnnnnnnnnnnnnnnnnnnnnnnnnnnnnnnnnnnnnnnnnnnnnnnnnnnnnnnnnnnnnnnnnnnnnnnnnnnnnnnnnnnnnnnnnnnnnnnnnnnnnnnnnnnnnnnnnnnnnnnnnnnnnnnnnnnnnnnnnnnnnnnnnnnnnnnnnnnnnnnnnnnnnnnnnnnnnnnnnnnnnnnnnnnnnnnnnnnnnnnnnnnnnnnnnnnnnnnnnnnnnnnnnnnnnnnnnnnnnnnnnnnnnnnnnnnnnnnnnnnnnnnnnnnnnnnnnnnnnnnnnnnnnnnnnnnnnnnnnnnnnnnnnnnnnnnnnnnnnnnnnnnnnnnnnnnnnnnnnnnnnnnnnnnnnnnnnnnnnnnnnnnnnnnnnnnnnnnnnnnnnnnnnnnnnnnnnnnnnnnnnnnnnnnnnnnnnnnnnnnnnnnnnnnnnnnnnncatatacagcccattcaacttggtctcattttttattttggtactctatctcaaccttattccattttgatcctcgaactctatttcttatgtttcattttaacacaaaagctgaaactagtgcaaaacaatatagcgcatgtgtatacacaaatctgaagtgtaataaatatccaagaaaaatagaggagctcgaggctcggttggcttctgaacttgccagggtcgaatctgacgccgaaaaggcaaaggccgatgcgaacgtgctcgtggccgtctatcgggccgatgctgaagctgcccaggtccaagcaagagagggagtcgagatcgccgatactcaagtacatcgggtcgctgaacttgctaagtgtggatgtcagagggagaccctcgaggagatccatattcgaggtttcgatctcgctgaagagataaaagggccaaacaactcgaagccgatgccgaaactttggctttcgatgatgataatgatgataataatgatgatggaagtaagagcgggtccgagaacggggggcgggggggagcctggtagagaagagaccgctcccggagataatcaagaatcttagcccttagtttctacattgcgatcaatcatgtaaacaatcttgtatatatataaatatctttttcttttaccgacttgcttctgttttcattcctgccttgtgaagattttattcatgccttatgaatgttttaggcaatttgatcgaatttggacttcgtagcctttataaccgaacgagcgcttacttcgcttactcaaacttggaataaggtagctcataagcttagtagtcgagttgagtgattgctcaaacttgagatgatgtagcccttaggcttattagttgagtgaatattttgaactcgaagaaatgtagcatataggcgtaatagtcgagtgagtgcttgctcgaactcgaaataagagtagcccgtaggcttattagttgagtgaatgattcgaactagaagtaatatagcccgtaggcgtaatggtcgagtgaatgctcgctataagtcaaaaataaaagtagcccgtaggcttattagtcgagtgaatgtttcgaactcgaagtaatataacccgtaggcataatggtcgagtgggtgcttgctcgatctcaaaataaaagtagcccataggattattagtcgagtgaatgattctaactcgaagtaatatagcccgtaggtgtgatggtcgagtgagtgcttgctcaaactcgaaataaaagtagcccgtaggcttattagtcgagtgaatgtttcgaactcgaagtaatatagcccgtaggcataatggtcgagtgagtgcttgctcaaactcaaaataaaagtagcccgtaggcttattagtcgagtgaatgattttaactcaaagtaatatagcccgtatacgtaatggtcgagtgagtgcttgctcaaactccaaataaaagtatcccgtaggcttattagtcgagtgaatgtttcaaactcgaagtaatatagcccataggcgtaatggtcgagagagtgcttgctcgaactcgaaatgaaagtagcccgtaggcttattagtcgagtgaatgtttcgaactcgaagtaatgtagcccgtaggcgtaatggtcgagtgagtgtttgcttgaactcggaataagagtagcccgtaggcttattagtcgagtgaatgtttcgaactcgaagtaatatagcccgtaggcgtaatggtcgagtgagtgcttgctcgaattcggaataagagtagcccataggcttattagtctagtgaatgttccgaactcgaagtaatatagcccgtaggcgtaatggtcgagtgagtgcttgctcgaattcggaataagagtagcccataggcttattagtctagtgaatgttccgaactcgaagtaatatagcccgtaggcgtaatggtcgagtgagtgcttgctcgaattcggaataagagtagcccataggcttattagtctagtgaatgttccgaactcgaagtaatatagcccgtaggcgtaatggtcgagtgagtgcttgctcgaattcggaataagagtagcccataggcttattagtctagtgaatgttccgaactcgaagtaatatagcccgtaggcgtaatggtcgagtgagtgcttgctcgaattcggaataagagtagcccataggcttattagtctagtgaatgttccgaactcgaagtaatatagcccgtaggcgtaatggtcgagtgagtgcttgctcgaattcggaataagagtagcccataggcttattagtctagtgaatgttccgaactcgaagtaatatagcccgtaggcgtaatggtcgagtgagtgcttgctcgaattcggaataagagtagcccataggcttattagtctagtgaatgttccgaactcgaagtaatatagcccgtaggcgtaatggtcgagtgagtgcttgctcgaattcggaataagagtagcccataggcttattagtctagtgaatgttccgaactcgaagtaatatagcccgtaggcgtaatggtcgagtgagtgcttgctcgaactcggaataagagtagcccgtaggcttattagtcgagtgaatgtttcgaactcgaagtaatgtagcccgtaggcgtaatggtcgagtgagtgtttgcttgaactcggaataagagtagcccgtaggcttattagtcgagtaaatgtttctaactcgaagtaatatagctcgtaggcgtaatggtcgagtgagcgcctactcaaactcgaaatgaaagtagcccgtaggcttattcgtcgagtgaatgtttcgaactcgaagtaatgtatctcgtaggcgtaatggtcgagtgagtccttgctcgaactcggaataagagtagcctgtaggcgtaatggtcgagtgagtgcttgctcgaactcggaataagagtagcccgtaggcttgttagtcgagtgaatgtttcgaactcgaagtaatatagcccgtaggcgtaatggtcgagtgagtgcttgctcgaattcggaataagagtagcccataggcttattagtctagtgaatgtttcgaactcgaagtaatatagcccgtaggcgtaatggtcgagtgagtgcttgctcaaactcgaaataaaagtagcttgtaggcttattagttgagtgaatatttcgaactcgaagtaatgcagcccgtaggcgtaatggtcgagtgagttcttgctcgaactcggagatttatctcaatcgtgtttgcttaatagatctcgaaatataggaaaatttcttggatataagatatcgataaagaagaaaactttcattgcaagtcattatacatgtgttcatgttttgcgtcagggctcgggccaactacatgtgcatggttcgttttgaccatttggctcttacaaatttttctattggaaccctgttgttacgaaataactttcttacatcagaacttgatatatttgagggctaatgcccccccagtattcgaggtggattgtaaagagacctcaaatactgtcaaattgtttctaagtttagcacgatcaatggttgcctcattaaaaaccttgccgaaaaacccatttgggataaaactgatctaagggaaaaagagtgcaacgcgtgctttcagatctagggctttgtattgaaggatccatactagctcttgatcggactcctgcggaggttagtttcgaaatgtaaacgaatatgggatggtcataccttagtagtagtatcgttttaggtgcgacacattccaattgcttgatagttgtttgccgtttataataccgagcttgtaagatccttttccgaacgttttcgagaacctgatatggtccttcctagttcggtcctaattttccttcgtttagatttcgggaactgagggtaacttttcttagtactaagtcccctagtttaacatggcgaagcttagttcttcgattatagtatctttcgattcgctgcttttgggcaggtaattggacgagagcagcttcttgtttttcatcctataattcgaggctagtgatcatagcctcgttatttgactcttctgttgtatatcgaaacctggcactgggttccccgacttcgactggaatcaaagcttcggagccatatactaaggagaacggggttgcccccgtactagattttgatgttgttcggtatgcccaaagaacttcaggtaggatttctctccattttcccttagcgtcgttcaacctcttctttaggttttgaatgatagttttgttcgttgattcgttctgcccgttcccactggggtgatatggtgttgataatatcctctttatcttcgaagaatttcgtcactttgctgcggacaaactatttcccattgtcacacactatttcggaagctatcccgaatcgacatacgatatgatcccagataaagtctataacttctttctctctttcttttacgaactcctgtgcttcaacccatttagagaaatagtcagtcataattaaaatgaacttagatttacctggggccgatggcagggggccgtcgatatccattccccatttcatgaatgactatggggataggactgagtgaatctgctctccgggctgatggatcattggtgcaaacctttgacatttctcatattttcgaacaaactcctttgcatctttgtccatatcgatccaataataccctgccgggaagagtttggaaatctctactgcacagtgctgactttggaagcttatatctcacaatctacaatgaattgggagatgatcaaaatatgaaagttatagcccttgatgtctagtttccagaaagtcaaataatttgtaatttggagttttgtacaaaaaggttatgaccattatactagaggctatctcaaaagagtttgaaaatggcttttgagaattttgttcatcgcgaacgtgatgggggacttgcgaatgcgaagaagtgtcgcatgagtagtgtataagtttgcaaaaatgggtttggctcgtttcatctcatttccttcatgggagccggcctaggagcgattttggaactcaatcttcatcatccatgtcaaggtaagtgattcctacctattgcaagttaaatagttggtttatatacgaatttaggtgtgaaaatgcatggaaattagtagaaatttggggttttgaagaaaaaccaagaaattgatatttttggatttttaccacgaaattggacatggaattcagaataaatgatataatcgagttcgtggtgttatgcgtaacgtttatcttcgaacaattttggaatccgggcacgtgggcccgagggtgaattttaccgacttttagagcggagttggaaattatttaaattgattaattatgggtattagaacacatatttattgattttcacattgattgcaatgttttggatcgacaagcatcgatttgaggtattagagtggcgctggagccggctatggagcttcggagcgagataagtctcttgtctaaccttgtaagagggaatttaccccataggtaatttaaattaataattgttgctaattgtggggagctacgtacgcacgaggtgacgagagtctgtgcgtagctactaatattgctaagcccgggtagtttaggactcaaatcatgaattttttgtgataattgtatccttatttaatcaaagcattgggattatattgtaaattacaaaaacaacaacaacaacaacaacaacaacaacaacaacaacaacaacaacaacaacaatccaatataattccactagtggggtctggggagggtagtgtatacgcagaccttacccctaccatgaggtagagaggctgtttccaatagaccctcggcatccttccctccaataactccccaccttgctgttggggtgactcgaactcacaacctcttggttggaagtggattatattgtaaattgttagaggaaaattgaaaattactgaaagtttacatagttgaattttgtggaataatatttaactgtaaatggaaattgtacatccttatgtgttaatcttataatatattctcatttcggaggatcataaaaaaatgaccttctttcttgtggagcgggccgaatgccttggcagtattgatgcatctatggatcgtgccgcatgtccctcggcagtgtacacgacactctggatcgggtcgtacgaccacggcggaaatcgtgcctaacaataataatttacacgataccctgatattttattgcagcttgtgaagctaattgataaatcgggaatcattggaattgaaagaattaattatttctgcttattaagtaaattattgttgttctcataaatcatatttatttaaatatttctattttaatattattgacccatagtgagtgtcaaagtcgacctctcgtcactacttcttcgagattacgcttgatatttactaggtgcgggttgtttacgtactcatgctatacttgctgcacatttttgtgcaggtatatatatgtctagcggccttgcaggcgaagagaagtggttaatgcggagacttaggtgagctgcattctatattatgatccgcacccagtagagtctccttcggagttatttatattttttctgtctaatttgtattccggacagtcgttgtattttattttattttatattcctagtaaatgctcatgcagttgtgacaccggattttgggaggatttcgggttgttctatattgaatttgttaaagtattattattttctatgtaaatcccaattctttactatgtttattaaaggaaaatatgatttcaaaagtaataaaaaatgagaacccaatttagtatttattgttggcttgcctgacagtggtgtccgacgccattatgacgttaatggattttgggtcatgacaaaattattattgcaaaagatattatttaactgctacattttgattagtctacaatttctgtgatgacccaaaatgtcatctttaatttaaacattcattgatgtgttctataacctcaaaagtactattcatctttcatcgacctgcgtgcgcagtccgaataattttccgaaaagtttttatataaaaaatttattaaaatgtgaaatagaactttcaaactcaactgagttgactttggtcaatattttgagcaaacagacccggatcggtgttttgaaaattttagtaggtccgtatcgtgatttgggacttgggcgtatgcctggaatcgaatgcggaggtccttagctcgagttatcgcatgttgtcaaaatttttaagtttaaaggtttaatgacttaagagatttgactaatgtttgactttgttaataccgggtccgtattttggtttcggaacctggaatagttccattactatatttatgacttgtctgccaaatttggtgagaaacggagctggtttgatgtgattcggacgtccggttgttaaaatagaagttctaaagttttattgaaaatttcatttgatttggagtttgattcgtagttctaggcattattttggtgttttgattgcgcaagcaagtttgtatgatatttttggacttaaaaatcgaggagtccgagattttgtcatttttgacatttccaaaagcgggtgaggcaatttttgagcaagaaatcacggaaaatcttgaggtaagtcacttgtgatcattgttaatcaataatattgaattattatcgaataggggatttgaacttagggatttggaaataagatttgaagatttggatatcgagttgaggtcggattttggtaaaattggtatgttagactcgtggtagaatgggctttcagattttgtaccttttgtcgggttccgagacgtgggccccatggataatcttttagctatatttcggattttgatggaaaattaatattttcttatggaattaattccaataattttttttgactgaatcaaattatttgtggctagtttcgaggcgtttgaggtgagtaataattctaaattcggtcttgagggtatgaaacccaggattatgtgttatgtgattgattttgaggtgacgcacatgctaggtgacgggcgtgtgggcgtgcaccgtaggaattgtgacttggtcaaattccatggannnnnnnnnnnnnnnnnnnnnnnnnnnnnnnnnnnnnnnnnnnnnnnnnnnnnnnnnnnnnnnnnnnnnnnnnnnnnnnnnnnnnnnnnnnnnnnnnnnnnnnnnnnnnnnnnnnnnnnnnnnnnnnnnnnnnnnnnnnnnnnnnnnnnnnnnnnnnnnnnnnnnnnnnnnnnnnnnnnnnnnnnnnnnnnnnnnnnnnnnnnnnnnnnnnnnnnnnnnnnnnnnnnnnnnnnnnnnnnnnnnnnnnnnnnnnnnnnnnnnnnnnnnnnnnnnnnnnnnnnnnnnnnnnnnnnnnnnnnnnnnnnnnnnnnnnnnnnnnnnnnnnnnnnnnnnnnnnnnnnnnnnnnnnnnnnnnnnnnnnnnnnnnnnnnnnnnnnnnnnnnnnnnnnnnnnnnnnnnnnnnnnnnnnnnnnnnnnnnnnnnnnnnnnnnnnnnnnnnnnnnnnnnnnnnnnnnnnnnnnnnnnnnnnnnnnnnnnnnnnnnnnnnnnnnnnnnnnnnnnnnnnnnnnnnnnnnnnnnnnnnnnnnnnnnnnnnnnnnnnnnnnnnnnnnnnnnnnnnnnnnnnnnnnnnnnnnnnnnnnnnnnnnnnnnnnnnnnnnnnnnnnnnnnnnnnnnnnnnnnnnnnnnnnnnnnnnnnnnnnnnnnnnnnnnnnnnnnnnnnnnnnnnnnnnnnnnnnnnnnnnnnnnnnnnnnnnnnnnnnnnnnnnnnnnnnnnnnnnnnnnnnnnnnnnnnnnnnnnnnnnnnnnnnnnnnnnnnnnnnnnnnnnnnnnnnnnnnnnnnnnnnnnnnnnnnnnnnnnnnnnnnnnnnnnnnnnnnnnnnnnnnnnnnnnnnnnnnnnnnnnnnnnnnnnnnnnnnnnnnnnnnnnnnnnnnnnnnnnnnnnnnnnnnnnnnnnnnnnnnnnnnnnnnnnnnnnnnnnnnnnnnnnnnnnnnnnnnnnnnnnnnnnnnnnnnnnnnnnnnnnnnnnnnnnnnnnnnnnnnnnnnnnnnnnnnnnnnnnnnnnnnnnnnnnnnnnnnnnnnnnnnnnnnnnnnnnnnnnnnnnnnnnnnnnnnnnnnnnnnnnnnnnnnnnnnnnnnnnnnnnnnnnnnnnnnnnnnnnnnnnnnnnnnnnnnnnnnnnnnnnnnnnnnnnnnnnnnnnnnnnnnnnnnnnnnnnnnnnnnnnnnnnnnnnnnnnnnnnnnnnnnnnnnnnnnnnnnnnnnnnnnnnnnnnnnnnnnnttgtatagttgaataatctattgatatccttacattttcctcgtattagagaaattgatctatgaatcatgtttaaatcatatgtttacactgttaggacccacagaggtcgtgtacttgtggaattatctgctaaattactgttttgcactaagtcacagttctatttgcacattattaccttagtctctcttattaattattgatgcatcatgtcattgttgtagggctgcttatcatgatttctgagagcccgagagaatggagaggttgatgactgagtgaggtcgagggcctaattgtgaggatatttatgggatcgggttgcacgccgcagcatgtttctttgttatctgccatgattggcttgatatagcgtttgggctgaaggagaccctccggagtctgtacacacccctagtgagcgcaggtacctactgagtgcgagtgcgagtgtcgagtgctgagagattgggaggaatgagtgattgtgaggaaagagtgactgtagggctggagtgaatgggaggacttagtgattgttactcttagaggatgcattgatttcattattgctgcatttcagctgtcatatatcactgttttagaaaatttctaaaagacatccttttctatttcattcgaagttgttataaaattactatggagttttaaatgttgaacttgaaagcatgcctacctttttatgttggaaagtattgtagttggacttagctgagaagctcgtcactacttttagttccttatatattattgttacttactgagttggttgtactcaaactacaccatgcacttcgtgtgcagatccaggtgatcccggacacaaagggtgttgattctttcacacagtcgatttttcggagattcagaggtagctcccatgtttcgcagaccttgactctccttccctatccttttgtttatagtatttggtcttatattattatggaccgtgttttccatacttgtaatgtatatatgctcatgtactcagtgacaccaggttttgggagtgtttgtatcgatttttgcgagaattttggattgtgtttaaatattatattttcaaacttagaagaaattgtggtttattgaggttgttggcttacctagtactgagataggcaccatcacgacaggttaggattttgggtcgtgacacccgagggctcgggtaaattttggataggctacgagtggtttggaacatagaaaatctagtttttccttagcttcagttgtcatctggtttccttcttcgcgttcgcgaaggcactctcgctaacgcgaagagtgaactgggccgggtgggattttatcctacgcgaatgtgaagggctgtacgcgaatgcgaagtcgagggggggctgcccttcgcgaacgcggacaatgtttcgcgaaagcgtagctttgtggacctgggggaggggaaaccgatcaatgctcttcgcgaacatggcacaaggcttgcgaacgcgtaggctggtggatgtatgccttcgcgaatgcaataggctatttgagccgctgcatcgcgaatgcggcaggccttcgtgaacacgaagaagaccagacgcccagtgtcacaacccaaaattctcacctccaagatcatgatggcgcctaacatttcacttgctaggcaagccaacgttagaatataattagccattttaacaaaattttaaattaatcaataacacagaaacaaatgcagaaataaagtctaaaataaagtgaataattcataataaatgcaatatctaaataacatcccagaactggattcacaagttcacgagcttctagagtgatatttacaaaggtatgaaataaatacaaagttgtcttaatgaaaatacacagctgaataaaaataaagacggggactttaggagctgcggccgctgagcagttgtacctcaagtctccgcaggtggtccaatccgagctctctagtagctgtcgctgggactgtctccaaaatctgtacagtgtgcagagtgtagtatcagtataactgacctcatatactcgtaagtactgagcctaacctcgacgaagtagtgatgaggctaaggcgggtcacctactctacaacctaaacgcagtatataatcatgacagaaaatgggaatactaaacagaattaaataaccaactgaaaataataaccgcaacctcaagaataaaccagtgtcgtccagaatcacaaatctttaataattcagatacaaataccaaaagaaaaccaacacagctcaagaaatggaaacctataggttgttgcggcgagcaaccccatctcaccagacaacacaaattcctcccttatttcaccgtaacgatatcaacaacaatacataatatagggctaggaatttaatgggtgatgttagaaatggaagaaaatgagttaaagagtacaaatctatgaattggtgttgcgttttctcttcacaatcgcacctaggccaacctttaatggagagtttatgaaaaatgggtaaaatcccgttttggttctgttttaaggtctgggcgttaggccttcttcgcgttcgcgaaggacctgccgcattcacgatgtgcagcagcccgagtggctttcgcgttcgcgagtcttccttcacattcgcggaggttgttcccccctgttcttcgtattcgcgagccaatgctcgcgttcgtatagaagaatgactgacccctcccacaggtccctaaagcttagctttcgtgaaaagttggtcgcgttcgcgaagggtaaggcagctttcatgactgacccctcccccaggtccctaaacccaggtaccgtgttcgcgattaagaaaatcaccctgccccagtttactccttgcgttcgcgagagtaccttcgcgagcgcgatgaaggaaacacctaataacaattgaagccaaaaaaccatattttttctatgtttcaaaacactcgtagcctattcgaaactcacctgagccatcggggctccaaaccaaacatgcacacaagtcccaaaatatcatacgaactcgctcgcgtgaccaaaacactaaaataatgcctagaactacgaactagacaccaaatcaaatgaaattttcaagaaaactttaaaacttatattttcacaaccgaatatctgaatcacatcaaatcaactccgtttctcaccaaacttatagttgacctataccgaactccggaaccaaaatgcaaacccggtatcaacaagaccaaacatcagtcaattctaaaaatcattaaactttcaaacttttaatgtttcatcaaaattccatatctcgagctagggacctcggaatttaatttcgagcatacatccaggtcccaaattacgatacggacctactgggaccgtcaaaatatagatccagatccgtttactcaaaacgtaaaccgaagtcaactcaaattaatttttaaggcaaaacttcttattttaatcaatttttaacataaaagctttccggaaaggcccggactgtgtacgcaaatcgaggaaggctaaaaataatttttaaggctttggatcacagaattaggtttcaaaacatgatataacctatgaggtcatcacattctccacctctaaaacaatcgttcgtcctcgaatggatataaaaaactacctgggctggtgaaaagatgtggatatctactccgcatatctgactcgaactcccatgtatctgcctcgacagggtgacctctccactacactcgaactgaaggataactctttgatctcaactggcgaacctgccgggctagaatagccaccatctcctccttgtaaggaaaatctttgtccaactggccagatctaaaatctaacacgtgggacgaatcgtcgtgatacttccagagcatggacatatggattaccggatgaactactgataagaatgggggcaaggcaagcctgtaagccacatctcccactctctccagaatctcgaaaggtcaaatataccgagggctcaacttgcccttcttcccgaacctcatcacacccttcatgggtgatacccggagcaacactatctcttcgaccataaatgcaacatcacaaactctacggtcagcataacatttttgcctggactgagctgtgtgaagtctatcctaattaatcttgaccttatccaaggcatcccgcaccaaatctgtacccaataaccgagcctcccccggctcaaaccacccaactggcgatcgacaccgtctaccatataatgcctcatagggagcaatctgaatgctcgattggtagttgttattgtaggcgaactctgcaaaggggaagaactggtcccacgatcctccgaagtctatgacacatacgcggagcatatcctccaagatctgaatagtgcgcttggactgtccgtccatctgaggatgaaacgttgtgctcaactcaacccgtgtgcccaactcacgctgtagtaccttccagaagtgcgaggtgaactgcgtacctcgatcaaaaatgatagacactagcataccatgaattctatccacattaggcacacaaacatgaccctacatcctcaaaactctgtcatctccaacggtaacctgcttagcaccatcgtgctgcactatgtccctaaagaccaacaaatgagggtcgtcatactgccgatatctgatacgctcaaacaaagaagaccgagcgactgtgtaagctagaacacggctgggctctgaaatatccaacctcacaaactggttggttaaagtctaaacatctgatgcaagcggcctttcacagactggaatgaacgcaaggctacccatacttgctgcctttctactcaatgcgtcggccaccatattggcctttccaggatgatacaagatggtgatatcatagtctttcaatagctccaaccacctcctctgcctcaaattgagatcctttagcttgaacaaatactnnnnnnnnnnnnnnnnnnnnnnnnnnnnnnnnnnnnnnnnnnnnnnnnnnnnnnnnnnnnnnnnnnnnnnnnnnnnnnnnnnnnnnnnnnnnnnnnnnnnnnnnnnnnnnnnnnnnnnnnnnnnnnnnnnnnnnnnnnnnnnnnnnnnnnnnnnnnnnnnnnnnnnnnnnnnnnnnnnnnnnnnnnnnnnnnnnnnnnnnnnnnnnnnnnnnnnnnnnnnnnnnnnnnnnnnnnnnnnnnnnnnnnnnnnnnnnnnnnnnnnnnnnnnnnnnnnnnnnnnnnnnnnnnnnnnnnnnnnnnnnnnnnnnnnnnnnnnnnnnnnnnnnnnnnnnnnnnnnnnnnnnnnnnnnnnnnnnnnnnnnnnnnnnnnnnnnnnnnnnnnnnnnnnnnnnnnnnnnnnnnnnnnnnnnnnnnnnnnnnnnnnnnnnnnnnnnnnnnnnnnnnnnnnnnnnnnnnnnnnnnnnnnnnnnnnnnnnnnnnnnnnnnnnnnnnnnnnnnnnnnnnnnnnnnnnnnnnnnnnnnnnnnnnnnnnnnnnnnnnnnnnnnnnnnnnnnnnnnnnnnnnnnnnnnnnnnnnnnnnnnnnnnnnnnnnnnnnnnnnnnnnnnnnnnnnnnnnnnnnnnnnnnnnnnnnnnnnnnnnnnnnnnnnnnnnnnnnnnnnnnnnnnnnnnnnnnnnnnnnnnnnnnnnnnnnnnnnnnnnnnnnnnnnnnnnnnnnnnnnnnnnnnnnnnnnnnnnnnnnnnnnnnnnnnnnnnnnnnnnnnnnngaacgctccgatgatccgtgaaaacctcacacgacacgccgtaaagatagtgcctccaaatcttcagcgcatgaacaatggttgccaactctaagtcatggacagggtaattcttctcgtgaaccttcaactgcagcgatgtatacacaattacacttccctcctgcatcaatattgcacagagccctacacgggacgcatcacaatataccgtataagatcctgaaactgtgggcaacaccaacatcgatgttgtagtcaaagcagtcttgagcttctgaaagctcgcctcacactcctctaaccatctgaacggggcacccttctgggtcaacctggtcaatggggctgctatagatgaaaatccctccataaagcgacggtaatagcccgccaaacccaagaaactcctgatctccgtagctgaagtgggtctaggccagttctgaactgccttaatcttcttaggatctacctgcatgccccctactggtacaacgtgccacaataaagcgactgaatccaaccaaaactcgcactttgaaaatttagcatacaactagctggctctcaaagtctgaagtacaatcctgagatgttgctcatgctcctgtcgactgcgggagtagatcaagatatcatcaataaacacgatcacaaagaagtccaaataaggcttgaacactcggttcatcaaattcatgaatgctgatggggcatttgtcaacccaaatgacatcaccagaaactcataatgctcgtatcgagtcagaaaaactatcttagggatatcggatgccctaatcctcaactgatggtagcaagatctcaaatcaatctttgaaaacaccttggcaccctgaagctgatcatataagtcataaatcctcggcaatggatacttgttcttgatggtgactttgttcaactgccgatagtctatgcatattgtcatcgatccatccttcttcttcacaaacaacacaggtgcacccagggcgagcactaggtctaatgaagcccttatcaaggaaatattgaaagtgttccttcaattctttcaactctggcagggccatacggtatggcggaatggaatttgtaggaaacacctctggaaactcacgaacaactggcactgaatccatggaaggaacctctgaactagaatcgtggacataagccaaataagctagacaccccttctcggccatatgttgagccttcacataagagataatcatactggtagaatggccaggaatccctctccactctaaccgaggcaacccggccaaggctaaggtcaccgtcttagcgtgacaatccaatatagcatgataaggtgacagccaatccatacccaatataaaatctaaatcaaacatatcgagaagtagaagatctacactagtcttaagactcccaacggttaccacacacaaaagataaacacgatctacaacaatggcatcccccacaggtatgaacaaatacacacgagcactcaaagaatcatggggcacaaccaaatatgaagcaaaataggatgacacataggagtaagtagatcccagatcaaatagaactgannnnnnnnnnnnnnnnnnnnnnnnnnnnnnnnnnnnnnnnnnnnnnnnnnnnnnnnnnnnnnnnnnnnnnnnnnnnnnnnnnnnnnnnnnnnnnnnnnnnnnnnnnnnnnnnnnnnnnnnnnnnnnnnnnnnnnnnnnnnnnnnnnnnnnnnnnnnnnnnnnnnnnnnnnnnnnnnnnnnnnnnnnnnnnnnnnnnnnnnnnnnnnnnnnnnnnnnnnnnnnnnnnnnnnnnnnnnnnnnnnnnnnnnnnnnnnnnnnnnnnnnnnnnnnnnnnnnnnnnnnnnnnnnnnnnnnnnnnnnnnnnnnnnnnnnnnnnnnnnnnnnnnnnnnnnnnnnnnnnnnnnnnnnnnnnnnnnnnnnnnnnnnnnnnnnnnnnnnnnnnnnnnnnnnnnnnnnnnnnnnnnnnnnnnnnnnnnnnnnnnnnnnnnnnnnnnnnnnnnnnnnnnnnnnnnnnnnnnnnnnnnnnnnnnnnnnnnnnnnnnnnnnnnnnnnnnnnnnnnnnnnnnnnnnnnnnnnnnnnnnnnnnnnnnnnnnnnnnnnnnnnnnnnnnnnnnnnnnnnnnnnnnnnnnnnnnnnnnnnnnnnnnnnnnnnnnnnnnnnnnnnnnnnnnnnnnnnnnnnnnnnnnnnnnnnnnnnnnnnnnnnnnnnnnnnnnnnnnnnnnnnnnnnnnnnnnnnnnnnnnnnnnnnnnnnnnnnnnnnnnnnnnnnnnnnnnnnnnnnnnnnnnnnnnnnnnnnnnnnnnnnnnnnnnnnnnnnnnnnnnnnnnnnnnnnnnnnnnnnnnnnnnnnnnnnnnnnnnnnnnnnnnnnnnnnnnnnnnnnnnnnnnnnnnnnnnnnnnnnnnnnnnnnnnnnnnnnnnnnnnnnnnnnnnnnnnnnnnnnnnnnnnnnnnnnnnnnnnnnnnnnnnnnnnnnnnnnnnnnnnnnnnnnnnnnnnnnnnnnnnnnnnnnnnnnnnnnnnnnnnnnnnnnnnnnnnnnnnnnnnnnnnnnnnnnnnnnnnnnnnnnnnnnnnnnnnnnnnnnnnnnnnnnnnnnnnnnnnnnnnnnnnnnnnnnnnntaacagcgttatatgactcagcctcaggcctggctggaaaagcataacatcggggctgggcccaccaccctaaactacatccctgggacgacctctagctggatggtctccacctctaatggcctaacctccacctctaacaatctgacctctacctctggctgcctgacatctgcttctcgctggctgaggaggtggtgcagcaactggtgccggaaccatggcacgagaaccctgatgctatggcgtgatgcccaataatctcggacaggtcctcttgatatgcctataaccactacactctaaacatccgtcctactgccgtggtggtagaaattgagattgacccgaatgggccggatgaccacggtagtaactctgaatagtggtgggctgataggagctggtggtgcactataggctgactgtccagaatgaggcacataagcaccacgactccctgaagcattgtgggatgcctgaagcactgaatgaaacaaactaagaggatggcctctacaaaaagtacccctacctccagatgaggcactgctgaacccaccagagtgacgaggtatcttgtcagaaccctgacctccctgagcaagaaccatctcgactcgcctagcgatattggcagccgcttgaaaagaaatctcactcctagtctccttagccatatgtaatctgataggctgagcaagttcgtcaataaacctcctcgccctatctctctcggtaggaagcagaagaagagcttgacgggccgaatccacaaaatgggtctcgtactgagtaacagtcatactgccctgcctgagacgctcgaactgacgactatgctcctctctcaatctaataggaagaaacttctctaggaagagctgagagaactggtcccaagtaagagcggccaatccagctgctctggtcaacaaataatctctccaccatttcttggcggaacctgacatctaaaatgcagcaaaatccaccccattggtctccactatacccattttccttagcacctcacgacagatgtcaagatactcctggggatcctctgaagaagcaccactgaagtgaactaggaagagcttggtaaacctatccaatctccataaagccttgaaagacatagctgacccatcaccggtctatgccgcaacaaccggttgaactactccgactggatgaactgttggagtctgatactggggaggcatctgctccagagtgtgagtagtaggagtctgtgctcctcctccaacctgagagacagccggtgccatggggaatgcgtcaatctgggtcacaatctccatacggcccaccaaacggaccaaaccatcctgaagtattggtgtgccaatgaacccctccgggacgtgagctagaacatcctcatcaaactctacctgaggctccaccgctggtgctgctgctcgagctctaggctaagttgtgcccctgcctcggcctctagcacgacctcggcctcgaactctgcccctcgtaggaggtgccattggggtctctggatgctgcgcagctaaagttccggtactcgttctcgctatctgcgagagaactgaatcgaagggtccaatcagcaatgataggataaatcgcatgacagagaagaatagaagtgaaattgtttctaactccatagcctccggaagataagtacagacgtctccgtaccgatcctccagactctactaagtttgctggtgactcgtgagacttatgcaacctagtattaataccaacttgtcatgacccgaaattcccacctttgggaccgtgatggcgcctatcatttcacttgctaggcaagccaatgttagaatataattagccattttaacacaattttaaattaatcaataacaaataaataaatgcggaaataaagtctgaaataaagtgaataattcataataaacgcgatatctaaataccatcccagaactggagtcacaagttcacgagcttctagagtaatgcataagagggtctggaataaatacaaagttgtctgaatgaaaatacacagctaaataaaaataaatacggggacatcaggagctgcgggtgcagagcagatgtacctcaagtcttcgcaggctgtccattatgagctctctagtagccgccactgggacagtttccaaaatctgcacaatgtgcagagtgtagtatcagtacaactgaccccatgtactggaaagtgccgagcctaaggcgggtcacctactctaccacctgaacccagtatataatcatgacagaaaataggaatactgaacaaaattaaacagccaactgaaaataataactacatcctcaagaataaaacagtgtcgtccaaaatcaccaatctttaataattcagatacaaataccaatagaaaaccaacacaactcaagaaatagaaacatatgggttgttgcggcgagcaacccgatcccactggacaacacaaattcctcccttatttcacagtaacgatatcaacaacagtacataatatatatatatatatatatatatatatatatatatatatatatatatatatatatatatatatatatatatnnnnnnnnnnnnnnnnnnnnnnnnnnnnnnnnnnnnnnnnnnnnnnnnnnnnnnnnnnnnnnnnnnnnnnnnnnnnnnnnnnnnnnnnnnnnnnnnnnnnnnnnnnnnnnnnnnnnnnnnnnnnnnnnnnnnnnnnnnnnnnnnnnnnnnnnnnnnnnnnnnnnnnnnnnnnnnnnnnnnnnnnnnnnnnnnnnnnnnnnnnnnnnnnnnnnnnnnnnnnnnnnnnnnnnnnnnnnnnnnnnnnnnnnnnnnnnnnnnnnnnnnnnnnnnnnnnnnnnnnnnnnnnnnnnnnnnnnnnnnnnnnnnnnnnnnnnnnnnnnnnnnnnnnnnnnnnnnnnnnnnnnnnnnnnnnnnnnnnnnnnnnnnnnnnnnnnnnnnnnnnnnnnnnnnnnnnnnnnnnnnnnnnnnnnnnnnnnnnnnnnnnnnnnnnnnnnnnnnnnnnnnnnnnnnnnnnnnnnnnnnnnnnnnnnnnnnnnnnnnnnnnnnnnnnnnnnnnnnnnnnnnnnnnnnnnnnnnnnnnnnnnnnnnnnnnnnnnnnnnnnnnnnnnnnnnnnnnnnnnnnnnnnnnnnnnnnnnnnnnnnnnnnnnnnnnnnnnnnnnnnnnnnnnnnnnnnnnnnnnnnnnnnnnnnnnnnnnnnnnnnnnnnnnnnnnnnnnnnnnnnnnnnnnnnnnnnnnnnnnnnnnnnnnnnnnnnnnnnnnnnnnnnnnnnnnnnnnnnnnnnnnnnnnnnnnnnnnnnnnnnnnnnnnnnnnnnnnnnnnnnnnnnnnnnnnnnnnnnnnnnnnnnnnnnnnnnnnnnnnnnnnnnnnnnnnnnnnnnnnnnnnnnnnnnnnnnnnnnnnnnnnnnnnnnnnnnnnnnnnnnnnnnnnnnnnnnnnnnnnnnnnnnnnnnnnnnnnnnnnnnnnnnnnnnnnnnnnnnnnnnnnnnnnnnnnnnnnnnnnnnnnnnnnnnnnnnnnnnnnnnnnnnnnnnnnnnnnnnnnnnnnnnnnnnnnnnnnnnnnnnnnnnnnnnnnnnnnnnnnnnnnnnnnnnnnnnnnnnnnnnnnnnnnnnnnnnnnnnnnnnnnnnnnnnnnnnnnnnnnnnnnnnnnnnnnnnnnnnnnnnnnnnnnnnnnnnnnnnnnnnnnnnnnnnnnnnnnnnnnnnnnnnnnnnnnnnnnnnnnnnnnnnnnnnnnnnnnnnnnnnnnnnnnnnnnnnnnnnnnnnnnnnnnnnnnnnnnnnnnnnnnnnnnnnnnnnnnnnnnnnnnnnnnnnnnnnnnnnnnnnnnnnnnnnnnnnnnnnnnnnnnnnnnnnnnnnnnnnnnnnnnnnnnnnnnnnncccaccatatgtcaatatcagtatcaaaattcaccattatttcaccatgtcaatccacccttattcaacctgttttggcgtgtaaccccatcccaccgtatagtgcaaattcacccttattccacctcatcatatcacccttatttcacctattgcggcgtgcaacccgatcccaccatatcaatatcaagtactcaatacgcatagtaaaactcacaattcaaaatattacgattccaagacaccaaactgaacaaataggaaaccttgtacaatatgataatccgaataagtaatactacatatagagaccaatccagaatttacaactacaaggtacagataaaccaacttgagcaaatagtaggagattatgaaaccatggaaagaaataatattatgaacaggaggaaacaaagactacaaatagcaatttggcatgtaaacacatttagagcatataacaaataaaacagggaaagagataatataagaagaacggggaaacagggaaaaatagataattcggcggcgcataagccctcgtcacctgacatatactccgctcacatgaaattcacatagcaaatagtccgagggttcctaattcactcaagtaaagattagacacaatacttacctcgctccaaaggccactcaatgctccattaccacttttcctctagaatccacctccaaaccactcgtatctattcacaaacgactcaataatatcaaatattgctaaaaaatcaattacaatgcataaatttagattccccaaactttccctcaaaaagtcaaaactcgacctcgggcccgcttggtcaaaacccgaggttcggaccaaaatccatttatcaattcaccctcgagcccgattatataattagttttggaatccgatcccaaattgaggtctaaatccccaatttgcaaaaaccctcaattcttcctaaatctctagttttctaccatgaaagaacaaagattagggctaggaatttaataggtgatgttagaaatggaagaaaatgagttaaagagtacaaacctatgaattggtgttgagttttctcttcacaatctcacctaggccgagctctaatggagagtttacgaaaaatgggtaaaatctcgttttggttatgttttaaggtctgggcggcatgccttcttcgcgttcgcgaagggcctgccgcattcgcgatgtgcagcagcccgagtggctttcgcgttcgcgaagggcctgccgcgttcgtgatgtgcagcagcccgagtggctttcgcgttcgcaagtacatcttcgcgttcgtgtagaagaatgactgacccctccccctaggtccctaaagcttcgcgttcgcgaatggtaaggcccccattgcttcgcgttcgtaacccggctaccgcgttcgcgattaagaaaatcaccctgccccagtttactctacgtgtttgcgagagtacctctgcgaacgcgatgaaggaaacaccatataacagttgaagccaaaaaccagttttttttctaagtttcaaaacacctgtagcctatccgaaactcacccgagccctcggggctccaaactaaacatgcacacaagtcccaaaaacatcatacaaactcgcttgcgtgaccaaaacatcaaaataacgtatagaactacgaatcagactccaaatcaaatgaaattttcaagagaacattaaaacttctattttcacaaccgaacgtccgaatcatgtcaaataaactctgtttctcaccaaattcgacagacaagtcatgaatattatagtggacctgtaccgggctccgaaaccaaaatatagacccggtatcaacaagaccaaacatcagtcaattctaaaaatcattaaactttcaatcttttaatatttcatctaaattccatatctcgggatagggacctcggaattctattccgggcatatacccagatcacaaattacgatacggacctatcaggactggcaaaacacagatccgggtctgtttacttaaaatgttgaccaaagtcaattcaaattaattttgtaacgcaaaaattcttatttttatcagtttttaacataaaagctttttggaaaaatgcctggactgtgcacgcatatcgatgaaggctaaaacatgatttttaaggcttcgcatcacagaattaggtttcaaaacatgagatgacctgtggagtcatcacacccagtgattaaaacagatcaaaaacgggatttttcccatttttcacaaactgtccattagaactcggtttaagggcgatttcaaaggagtttttcacaatttagaactggataaatgttctttatcatatagtgattatatttcataaattcatgtctatattcgtcatttatttcggaattagatggaagaaattgggatttttataacatcttccaaaaatgtaaaatgaagatttgaaagccaatctaatgtcggattcgataatttttgtatggttcaactcgtatcagaacgggtgttcggttttcgtgagtttttcgagattcaagatgtgggtcccactgttgatttttaaaataaatttcagattttaattcggaaaattagtaaattcatatggaatcaattcctacgatttgtattgagtatattgaattgtttatgactagatttgagtatttcggatacgaattcgcgaggcaaaggtttattgaaatcttgaatttggttgcaaagcgaggtaagtgtcgtggttaaccttgacttgaggggaatagaacccttgaattatttgttacatgaatttcatgtgtaacgatgtataggaaaggtgacgagtgcctatactttgtcaaattaattgtttgaataattatttaaatattataaattgttttaagacacgaattaattgttataataattgtttctctcatattccctgtcaaatataaattcttggattcatgcaatatttgttacatgcttatttgatctatgtatcttaattgctacttgacatttagcatatttaatattaaattgcctattttctccctgatttttccataattaattctacttgtcattacatgtttcttgaataaataataatcattgtatgctttgttgccaaataaattcttattgaatgtggtatttattggagtatttttattacaattaagagttattaatttatattgttggaacgggttgcacgccacaacggaaatgaaaaggaatatattgggggatcgggttgcacgccgcaacagattacattttaagtttatattattggagtgggttgcatgccgcaatggaaatttattgaagaattatattattggatcgggttgcacgccacaacggaaattgattgaaattataattggttatgactgccaaattggcttcaactgttgaaataagttacatgttttatttctatcattgttgttattactattattgcgtacaggttaatgtaagtgacctgacttagcctcaccactacttcgtcgaggttaggctcggtacttacagagtatatggggtcggttgtactcatactatactctgcaattcttatgcagattttgaagttggtctcagcggcgtaccatagacttgctcggatttcagctatccagaggagacttgaggtataactgcatagcgtccgcagttctaaagtccccttctactttattttagctgtgtgatttctttaagacaactttattttattcaaacctttgtttgtattattctagaagctcgtgcacttgtgacttgagttcagtatatatggattaaataaataagtcttaatacattgggctagcccatttaatttggctaaagtggtgagcccgcttcattaagcccaatatgtcatcttcctagaggccaagtttggtgccacgtgtcaaatgatgtggcacgccaagtcaaacaaaagagccaataggatcgtgccacgtgtcaaaatgacaaggcatgccatgccaaattgaatggccaatgaaatcgcaccacgtgtgcaagtgacatgttctggccaatcaaatgcggccttgtcacacttcaatttgattgataggaaagagtttgttcttaccataactcttccctcccataactataaataggggtcgtcataacctagaaaagagaccaaaagttataacaagaagcaagagggagctcgtggatcaaacgttgcggatttctctaaaagctacaagcattcaagtgttctaaggattaaaagatcaagacgaagattcaagaacaagctacaagcccttggattaaaaatacgtcaagatcaagatcaagcttcaagcacttggattaaaataaaataaaattcaagattaatctcgaaggctcttttatttactattgaaaagaagaatcagaggattcatagagattgtaacacttaattatttgaaataatatactacgattgttgtgatattttcgatcttgattttattttctcaacgcaatttattgtctacaaattctggcacgcccagtgggacaatatctacctctcatcttaacttctcaatcaccaaagttcaagaacattgaaatggcttcaaagaaaatcaactccagttcaacttccaccaaggctgctaattccaggttctatnnnnnnnnnnnnnnnnnnnnnnnnnnnnnnnnnnnnnnnnnnnnnnnnnnnnnnnnnnnnnnnnnnnnnnnnnnnnnnnnnnnnnnnnnnnnnnnnnnnnnnnnnnnnnnnnnnnnnnnnnnnnnnnnnnnnnnnnnnnnnnnnnnnnnnnnnnnnnnnnnnnnnnnnnnnnnnnnnnnnnnnnnnnnnnnnnnnnnnnnnnnnnnnnnnnnnnnnnnnnnnnnnnnnnnnnnnnnnnnnnnnnnnnnnnnnnnnnnnnnnnnnnnnnnnnnnnnnnnnnnnnnnnnnnnnnnnnnnnnnnnnnnnnnnnnnnnnnnnnnnnnnnnnnnnnnnnnnnnnnnnnnnnnnnnnnnnnnnnnnnnnnnnnnnnnnnnnnnnnnnnnnnnnnnnnnnnnnnnnnnnnnnnnnnnnnnnnnnnnnnnnnnnnnnnnnnnnnnnnnnnnnnnnnnnnnnnnnnnnnnnnnnnnnnnnnnnnnnnnnnnnnnnnnnnnnnnnnnnnnnnnnnnnnnnnnnnnnnnnnnnnnnnnnnnnnnnnnnnnnnnnnnnnnnnnnnnnnnnnnnnnnnnnnnnnnnnnnnnnnnnnnnnnnnnnnnnnnnnnnnnnnnnnnnnnnnnnnnnnnnnnnnnnnnnnnnnnnnnnnnnnnnnnnnnnnnnnnnnnnnnnnnnnnnnnnnnnnnnnnnnnnnnnnnnnnnnnnnnnnnnnnnnnnnnnnnnnnnnnnnnnnnnnnnnnnnnnnnnnnnnnnnnnnnnnnnnnnnnnnnnnnnnnnnnnnnnnnnnnnnnnnnnnnnnnnnnnnnnnnnnnnnnnnnnnnnnnnnnnnnnnnnnnnnnnnnnnnnngttacttttggaagctttggaccagtaatgaggagcaaagcaagctcgttaggacaacaagcaccctatatgccgtccgtatcaacccctattttggatcttcatcctcaaaaggagcaagatctttcacaagtgcacctgaaggaggaagcgatcttgctaaaaagatcaagaaaattctctttactacttgagcaggatgatgacaccaaacgagctgaattattcgccaattgaaaagttgtgtttggcgctagtcttctcaattcnnnnnnnnnnnnnnnnnnnnnnnnnnnnnnnnnnnnnnnnnnnnnnnnnnnnnnnnnnnnnnnnnnnnnnnnnnnnnnnnnnnnnnnnnnnnnnnnnnnnnnnnnnnnnnnnnnnnnnnnnnnnnnnnnnnnnnnnnnnnnnnnnnnnnnnnnnnnnnnnnnnnnnnnnnnnnnnnnnnnnnnnnnnnnnnnnnnnnnnnnnnnnnnnnnnnnnnnnnnnnnnnnnnnnnnnnnnnnnnnnnnnnnnnnnnnnnnnnnnnnnnnnnnnnnnnnnnnnnnnnnnnnnnnnnnnnnnnnnnnnnnnnnnnnnnnnnnnnnnnnnnnnnnnnnnnnnnnnnnnnnnnnnnnnnnnnnnnnnnnnnnnnnnnnnnnnnnnnnnnnnnnnnnnnnnnnnnnnnnnnnnnnnnnnnnnnnnnnnnnnnnnnnnnnnngagcaaatcacatcaagttcgtgatgtcaaaacatgtccttagtgatcgactagcaaggtggtacctccagtttcaacaatttgaaattgtatacatccctcgaaagctataaaaggacaagcgttagcggatgttttgccagatcaccctttacccgatgattgggagctaactgacgaactacctaatgaggacgcaatggtcattgaagtttagcctccatggaatatgtactttgatggtgttgctcattgcggagaagctggtgctggtgtagtatttgtcacttctcaaggtgaagttcttccctactcttttacgttgacgaaactctactctaacaatgttgctaagtatcaagcactaataattgggcttgaaatggctgtcgaaatgaagcggttgcaactgcaagtttttggtaactctcagttagaggtcaatcagcttctaggtagttacgaggtcaagaagcctgaactacgcccatatcatgattatgcgaaaaacttaatggggtggctcggtgatgtgactattcagcatgtgccaaggaaagaaaataagaaggttgatgctttagctgccttagcttcattattaaccctgcctgatcaagcgcaagttactgtctgccaaaagtgggtagtaccaccgccaaatgaggaagaaggtgaagaaaatgaactcaagcatcttgtcactgtttctgaagttgagaaagaagaatggcgacaacccattatcgactacttacgctatgggatacttccagaaaatcagaggagaaggactgaaatccgtcgtcatgcgcctcgcttcttttactacaaagatactctatacagaaggtcattcgagggagtactcttgcgatgcttaggggaataagaagcactccaagctttgcaagaggcacattctggggtatgtgggtcacaccagtctggtccaaagctccacttccataaaaatgggatgggatattattggccaacgatggtaaaagattgcttggactatgttcgaacatgcaaggcttgtcaattccatgcgaattttattcatcaacctcctgaaatgttgcacccgactatggcatcctggccatttgtctcttggggattggatgttattggaccactaccaaagtcctctggtgggcgcacctatacatcttggatacaattgactacttctcaaaatgggctgaagtcgttgctcttaaggaggtaaagaagaaaaatgtttcaagtttcattcgagtaaacataatcaatcgctttggcattcctctttacataataacggataatagaaagccattcgataataggttgatgaacaagatttgtgatctctttggcttcaagcaacttaactcttcgatgtgcaatgatgccgccaatggtctggttgaggcattcaacaaaactctatgtaacttgtttaagaaagtcgtctccaaatccaaacgtgattggaatgaccgtatagaagaagctatgtgggaatataggacaactcaccacacgccaacacaagcaaccctatatgcactcgtttatggagttgaagctgtcttgccactcgagcgtcaaataccttcattacgattagctattcaacaaggcatcactgatgaagaaaatactaaacttcgattagcagagttggaggctcttgatgagaaaaggttggaatctcaacagaatcttgaatgttatcaagctcgattgtctcgcgccttcaataaaatagttcgcccaagatccttttaagtaggagataaagtccttgccataagaagacccattattacttcccataaacctttagggaagttcacttcaaaatgggatgggccatatgtcgtgcaagaagattattcaagtggggcttacaagctggttgatgcagacggcatgagaatcggccatatcaatggcaagtttttgaagaaatattatccttgaaattgtaacgctccttgatgcatgagcctaaactgcacgttcctacactcctggcccgcatgagtctaaactgtgtacgccccaccaaaaaaaagagtctgctaggttgaaaaccttgaaagaggcggcctaggcaaaagttaggacaataaaaaaagatctgctaggttgaaaacctcgaaagaggcggcctagtcaaaatttaggacataaaaataaaatccacccattctgaactacggtatgacttgatcatcttcacagacgtacgtaggtagcttagagtttcattctgagttcagtcgtataagttcaaaagatacataatcccctaatcgttgtccaaatgaagtacgatgtaatgtaatccattcaatcagaacttgaaaatcaagttgagataccattcttctgttaaactttggatcccatttgatttaaagggagcaagcctttgtggtaaattggtatcttcaatggaatgattttagtcttttaggaggctacaaagtatttgcattgaagtctggggatttgctatgttttcatgttcatatgaccttcaagtttgttggtcttcatatccgctctctgccctaagaaaaaagggaagaggagaggcatcaaaagggaacacaagtataagaaggaaggttacttggcacaacgtttcaaattcagtgagacttgaacccaagatatttggtgagaatgtatatcttgaatttctattgatatcaagaaaaacgtcttgtgattctgaggcttccatacgaaaacataaaggttttggctaagtcgcgccaattcgaaactatcggtatatcaaattctgatgttgatttcgaaatattatctgaaactatcactaaggtattaaatcctacattttggatatgttttatattttaaagtcttgttttcaaaaaatcaaacggttcgtgatttcaacatttctacatcaagatataagagttttggtgaagtcgcgcaagtttgaaattgtcagcatgtcggaattttaagttaacttcgaaatattatctgaaactatccttaaagtattaaatcccacgttttggacatgttttatattttgaagtaaagtttccaagaaatcaaacggttcataatttcaacatttctacgccaagatatgaattgtttggtaacactgcgcaaatctgaaattttcaacatggtggaatctaaagttagtttcaaaatattacctgcggcgattcagaaggtgtttgatttcgaattttggatatgtcttagattttaaagtttattttctaaaaaatcaaatggctcatatttttgacgttctcacattgagatatatatctcctaccacaaaaggtacaaagatgatgaacaatattatcctcaaagaaaagggaggatgtacctccaaatacaaagaacttcgagacatgaacgccaacgacgtttaaaagaaagccatgttcaatcatggggacatcaatacatcatgataagcaaagaactattgatattaaaccgcaaagacaaaaaggggacattgatgaaaacgtgtgatataaagtaaaatggatagagttttcatttctaagaatagccactagttaatcaaatgcaaaaaaaaaaggaggcaaataaaatactctatatagactaatctaatcataaattgtaattcaccaagtctttaagggttgcctctaggtgttgtttcttcatctccacgtcggccaagtcatcagcagttgccaaggaaacatcagaacatctacggtactcctcttcaacacatgagactctagattcaatctctttaacctctttcttggcaacaccttgaagagctcttaactgtttcaccttctccttggcctctttgaaagactgactggcagcaaacaatctctcggccttctcccctttctcaatcaagacaagatcaagttgttccttggcgttttaaaatgactctgatttttcaacatccacaaccttgtcagaaagagttgaccgtgcctggtcatatgaagtggcaagctcaaagaaagatggcaataggccttttagaagggaaatatccacaccctttccgtccatctcctcgagagtcacttcaatctcgaattgaagagaagaagcattgtctgcggtaaggtccttgagtttggcatgaattttagcccaggcatttagaatgaaatccttgcnnnnnnnnnnnnnnnnnnnnnnnnnnnnnnnnnnnnnnnnnnnnnnnnnnnnnnnnnnnnnnnnnnnnnnnnnnnnnnnnnnnnnnnnnnnnnnnnnnnnnnnnnnnnnnnnnnnnnnnnnnnnnnnnnnnnnnnnnnnnnnnnnnnnnnnnnnnnnnnnnnnnnnnnnnnnnnnnnnnnnnnnnnnnnnnnnnnnnnnnnnnnnnnnnnnnnnnnnnnnnnnnnnnnnnnnnnnnnnnnnnnnnnnnnnnnnnnnnnnnnnnnnnnnnnnnnnnnnnnnnnnnnnnnnnnnnnnnnnnnnnnnnnnnnnnnnnnnnnnnnnnnnnnnnnnnnnnnnnnnnnnnnnnnnnnnnnnnnnnnnnnnnnnnnnnnnnnnnnnnnnnnnnnnnnnnnnnnnnnnnnnnnnnnnnnnnnnnnnnnnnnnnnnnnnnnnnnnnnnnnnnnnnnnnnnnnnnnnnnnnnnnnnnnnnnnnnnnnnnnnnnnnnnnnnnnnnnnnnnnnnnnnnnnnnnnnnnnnnnnnnnnnnnnnnnnnnnnnnnnnnnnnnnnnnnnnnnnnnnnnnnnnnnnnnnnnnnnnnnnnnnnnnnnnnnnnnnnnnnnnnnnnnnnnnnnnnnnnnnnnnnnnnnnnnnnnnnnnnnnnnnnnnnnnnnnnnnnnnnnnnnnnnnnnnnnnnnnnnnnnnnnnnnnnnnnnnnnnnnnnnnnnnnnnnnnnnnnnnnnnnnnnnnnnnnnnnnnnnnnnnnnnnnnnnnnnnnnnnnnnnnnnnnnnnnnnnnnnnnnnnnnnnnnnnnnnnnnnnnnnnnnnnnnnnnnnnnnnnnnnnnnnnnnnnnnnnnnnnnnnnnnnnnnnnnnnnnnnnnnnnnnnnnnnnnnnnnnnnnnnnnnnnnnnnnnnnnnnnnnnnnnnnnnnnnnnnnnnnaaagagtcaagacaacctttcttccatcaaagatagacatggttggtgttgatcattggtgaaatttaggccccaatttcgctccaagactaggaatggaagtcgcctcttggtctgacttaggtattggaagtgatttcctcgagtctggctccgccacagatttgctactacttggggcttgctttggtgggacgccattgaaatgtgaacaccatttgcatgcatagaaaaggatatacggttagttaaattacttggatattataaaataatttgaatgttctaatcgttacctctttggtggtcgtcaaagtccttgaaacactaccgatgttgtcagtaatctcgactatacccaaattagcatctccttgtttgtttgaatatggcttcacccgcttgaagttttgatctccatgactactatcactctcgttttgggacggacgtttgttggaggtaagaacaatagtacctaatggaaaggaaccctcattggcttgatgagcctgaacatgtcccttaaagtcacatggtacaaccactttggattttaaagtaggaggttggccctccctgttatgctcttgaggcatgatctctaaaggtgtagcagtaactggcccagcggtattcaccaaagattgcaagtggttttcaaggaagcgtccatgcactatttctcaccaagacttataatcagacgagacatacttcttcattttgggcataatagggggaaatgtggcctttgaccaacttttacacaaaacacaaattcataaaagtttcaatcctttatctaaagagcactcatgaaaatcttgatctaagcaaccggggatgtcttgagaaaaaccgaattgacgactgaagcgatcagtgctataaggctccacgatgaaggtcgatccatttttcaaaggaaggtaattcgagagaatactcataaaataatttgacttggactcttccgcattgccatcatcacgataataatacggttgaggattgcttggcattgtggaagtccatacgacactttctcctccatgaatatgttttatcgcgtcatcattcccaaaatatctcgttgttccctcacatgagtataggccattagaggaatagacggcctatttgttatagcaaaatgagtcttgaagtagcaggctaaccaaccatacacataatgaattgggaagtaaactctagaagaatcgagtggtgagctatttgaaattgtgtttaatcccctgtaaatgctagctaaaactggaacggcgaggttaattctttgcccacacgccagaagtcctgcaatctttaaagtctcggatcgaataaagtcgccttattttgtaaggagcacaaagaaacataaccagcatgataaaaaggcagccaagtatacttcatctttcttgtcacttccaacgccaagtttaacaaatagtgcatcttcaacttccgaccaattgaccattttacctatggctnnnnnnnnnnnnnnnnnnnnnnnnnnnnnnnnnnnnnnnnnnnnnnnnnnnnnnnnnnnnnnnnnnnnnnnnnnnnnnnnnnnnnnnnnnnnnnnnnnnnnnnnnnnnnnnnnnnnnnnnnnnnnnnnnnnnnnnnnnnnnnnnnnnnnnnnnnnnnnnnnnnnnnnnnnnnnnnnnnnnnnnnnnnnnnnnnnnnnnnnnnnnnnnnnnnnnnnnnnnnnnnnnnnnnnnnnnnnnnnnnnnnnnnnnnnnnnnnnnnnnnnnnnnnnnnnnnnnnnnnnnnnnnnnnnnnnnnnnnnnnnnnnnnnnnnnnnnnnnnnnnnnnnnnnnnnnnnnnnnnnnnnnnnnnnnnnnnnnnnnnnnnnnnnnnnnnnnnnnnnnnnnnnnnnnnnnnnnnnnnnnnnnnnnnnnnnnnnnnnnnnnnnnnnnnnnnnnnnnnnnnnnnnnnnnnnnnnnnnnnnnnnnnnnnnnnnnnnnnnnnnnnnnnnnnnnnnnnnnnnnnnnnnnnnnnnnnnnnnnnnnnnnnnnnnnnnnnnnnnnnnnnnnnnnnnnnnnnnnnnnnnnnnnnnnnnnnnnnnnnnnnnnnnnnnnnnnnnnnnnnnnnnnnnnnnnnnnnnnnnnnnnnnnnnnnnnnnnnnnnnnnnnnnnnnnnnnnnnnnnnnnnnnnnnnnnnnnnnnnnnnnnnnnnnnnnnnnnnnnnnnnnnnnnnnnnnnnnnnnnnnnnnnnnnnnnnnnnnnnnnnnnnnnnnnnnnnnnnnnnnnnnnnnnnnnnnnnnnnnnnnnnnnnnnnnnnnnnnnnnnnnnnnnnnnnnnnnnnnnnnnnnnnnnnnnnnnnnnnnnnnnnnnnnnnnnnnnnnnnnnnnnnnnnnnnnnnnnnnnnnnnnnnnnnnnnnnnnnnnnnnnnnnnnnnnnnnnnnnnnnnnnnnnnnnnnnnnnnnnnnnnnnnnnnnnnnnnnnnnnnnnnnnnnnnnnnnnnnnnnnnnnnnnnnnnnnnnnnnnnnnnnnnnnnnnnnnnnnnnnnnnnnnnnnnnnnnnnnnnnnnnnnnnnnnnnnnnaagttgatttgggacgagctgacttcttttcttttctcgctggaggttattcatactttaaaacatttttgctccaaaactcgatccatcttcttatagggacgttatgatttttagcgtttccctctcggagttggtgatatgcatcaaacaattactgacaggcttgtggaaggaacattttatccttgtcgtaaccacctgtaagttctcgagtatttggaataacttcctcataaggagaccccattaaagatagatccccaatagtgcacaaatcccacaggaatgtggattactctccaactgaggtaagcaacgtgtttgtaagaggacaccaagtctcacaaaagacttgcatgatacttgtagaatgatcataagtaaacaatgaggcatatacaacatcgtaaatattggtggcccttaatgctcgatggttcctactaaagaacatcttcggtccactcccaatagccggggatataatgaaattctccaccgaaagttaaggaatcactccagcatacttctcctttgaggattcgtcgtcctaagtatgggagggaacttgccacatttttaactttgtgattatgggaacgaagagtccatgtcttgaatttacgtttggtgttttcaaaggtccaatctaccaaagaaaatggattttgcaaggatggccacgaagctgcatataagccggttaatggtgtatcaactagtaatctggtctccgttttactatccttgtgctctgaaattactagatacttgggcgtgaaggaagagaatgttgagtctctgaagtaaactatgttcaagttgcataaaaaaaattattagtacctaagtcaaaagggaagagtaacaatcactgtcatgaaagatagcatggataagttaaaaaaaacaatcacctcagacgtaaaaacaaaaaggatgtctatgtcagactttttttaaagatttccgttgagaactattaaaggtttccttctcgaacttataaaggcattcgaatttttagaggttttcgttgcgaacatttaaaggtgttcgtttcaaagttttaaaggcattcggatttttaaggttttcgtttcgaacttttaaatgtgcttgtaaaggtgcacatgacgaactttaaagagtccccactgccgacttttaaagatttctaccataaatttttaagagtcttcattgtgtgcttttaaaggttttcaccgcgaacttttaaaggtcttcaccgtgaacttttagagatcttgaccacgagcttttaatgattattatgcgaacttttaagggtcttcaccacgaatttttaaaggtctccatcgcgaacttttaaaggtgttcgccgcgaacttttaaaggtcttgactacgagcttttaaggatcttcgcgtgaacttttatgagtcttccccgtaaattttaaaagtattcatcgcgcaaacttttatgagtcttccccacaaattttaaaagtattcatcgcgaacttttaaaggtcttcgtctcgaactttgaaagtacttcatggttcgacgaagttactacttctgagaaaaaaaaaagagacaacagaatacaaaaaaaagaaagcacaagagaagaagaagagaagaagaagaaattactttcgcgttaatgttttcaagccatcaaaagtagacgcaaagtgacttgcaaatgctagaattgacgttaagagaatgacgagtattggtatttatagatctcagaagacgctattaaaaaataaagcatcgatgtgggatagctgttttaattagactcctcgagggattcaaattgaaattggacctacgcatagtgtccaatagcgttgccttctgttctccttttccaattttcaatcaaagaaagaattgccattagcgtttgccatatgttctccttttctaatcaaagaaaggaattaggaattgccaaatccatatggattcggtcagcttgtaccgatggtccacaaaattgaggaaaatggcatctacattataataatgataataattattatctctcttggtaattacaatgattgaattcactttaatatttaagtgtggaccaaactaccaacatgctatcaacggacacgtaaccaattatacattgatccattatctgttttggcaaataggatttacatatactattatcaagtttatacttctaagtctagtcttcaaaaatttaaagaccttgacaagtcttgaagtaggggcattcgtagacatataaattttattaaaattaaattcataaaatgatttggactatattttaaattcaagataaattggtccaaatatatattatgggctaatataattgaattaattatataagtccaatatatatagattaaataaataagtcttaatcaattaggctagcccatttaatttggctaatgtgatgagcccacttcattaagcccaatatgtcatcttcctagaggcccagtttggtgtcactgtcaaatgatgtggcacgtcaagtcaaacgaaagagccaataggagcgtgccacttgtcaaaatgacaaggcatgccaagccaaattgaatggccaatgaaatcacgccacgtgtgcaagtgacatgttctggccaatcaaatacggccttgtcacacttcaatttgattgaacggaaagagtttgttcttatcatacctcttccctcccataactataaatatgggtcttcataacccagaaaagagaccagaagttataacaagaagcaagagggagctcgtggatcaaacgttgcggatttctctagaagctacaagcattcaagtgttctaaggattaaaagatcaagacaaagattcaagaacaagctgcaagcccttggattaagaatacatcaagatcaagatcaagcttcaagcacttggattaaaataaaataaaagtcaagattaagctcggaggatcttttatttactattgaaaagaagaatcagaggattcatagagaatgtaacactcaattatttgaaataaaatactacgattgttgcgatattttcggtattgattttattttctcgacgtaatttattgtctacagtatgatttattcaattttgtatttttagtttcttctttagatataatgtctatttgatccaattgtatattttatcttttcagatcaaatttataaaatcattagctagaaaaaatagttttagctaaaataataaagtaccaatggtgtattatttgttattttttagatgcaaataactatctatctaaattatgtatttttatttttgggtcaaattaataaaaatattggctagaactttattattttcttgcttaattaaaaaggtacaaccaacataggagttgtaattattttcagaaatatcacaatatttttgaaatgctacctactatgtttgtaacgacccaaccgatcgttttgacttttagaacctcattcccctaaataagactcttcgtatgtgtttttactaatttatgacttgcggggatggttggttcgggatttgaaagtgtttgggttgaaatcggaacactcagttccttgggttggctttaaaaggggcaagtttgacttcggttaatatttttagaaaatgaccccggaatcgtgatttgacgattccaatagttcgtatgatgattttgggcttgagcgaatattcgaatcggattttggacaaatgttcgaatcggattttggacaactcgggagcgtttcagcgcttaatagtgaaaaataaactatttaaaggtttaaggttctttaaatttggtttgtagtaggttttggagtaattgaagcacgtttggaatttcgagaccggaaatagttccgtaatgtcatttaagacttgcacgcaaaatttggcatattccgagtagttaaaatacgtttcagcgcattgggagtaaattgaagaacttgaagttcataagtttgattcaattggttttggggtgtgagttttagttttaatgttgttttgggaattttgagagtttgtgcaagtccgttttatgatttcaaacttgttggtatgtttgggtggagccccggggccccgagtgttaatcggacgaggctcgaaccaagttggaaatttggagccaaagctaaagctcccagctgctgtaagaatcgcacctgcgcttggccagctgcaagtgcgagctcgtaggtgcgagccacgagccgtaggagagaagaagaggaggggccgttgggcaccgcagatgcgtgcaaaaaaccacatcttcgaaggcgcatgtgcgaaggggtgaaacgcaagtgcggaggaaggcgcatgtgcggcttatagaccgcagaagcggtctcgtagaagcgagccgctgaccgcaggtgtgagcgaagcgggataaaggaaatctgcatttgcgagggaatttccgcagatgcggagacgcagaagcggcttgagaaccgcaagtgcgaaaatgctgctgggtagaatggtttaaagggaacgaggctcagtcatttttagcccatatttgctccattttgcgcgattttggagcttttgacagggaatttcaactagcaacttgaaggtaagttaattctgcaaactttgagttaaatacatagattacgggtagattataacctataatcttgaaaatcaagggtttagtacaaaacctaggttttgatacaaaacctaggttttgataaaaatgagattttaatcacgaaaatggctatggaattggatggaaattgtatatttgagttcttgagattatggataacgatttcctccaaatattttcggaatatgggcacgtgggcccggggtgaaattttaggaatattaatatttcgggttgggtaattaatttaatagcctaattttgaattattgagcatgtattattatttttcataacatttggatagtttcggaattttcggcaatgaattgagactttaacgcgacgttgttatcggaaagtgggctttgagacaaggtactcttgtctaaccttgtaagagggaatttaccccataggtgatttaaattaataatttttgctaattgtgggggactacgtacgcacgaggtgacgagagcctgtgcgtagctactaatattgctaaagtccgagtagtttaggactcaaatcatgaattatttgtgataattatatccctgtttaattaaagcagcagtattatgctgcaaattgttagaggaaatggtaaaagattgaaatctcacatacttgaaattttgttcagaatatttaactgttgtaaatatttgtacatcctcctgcgttaatctcaaaaatgtatatatatatatatatatatatatatatatatatatatatatatatatatatatatatnnnnnnnnnnnnnnnnnnnnnnnnnnnnnnnnnnnnnnnnnnnnnnnnnnnnnnnnnnnnnnnnnnnnnnnnnnnnnnnnnnnnnnnnnnnnnnnnnnnnnnnnnnnnnnnnnnnnnnnnnnnnnnnnnnnnnnnnnnnnnnnnnnnnnnnnnnnnnnnnnnnnnnnnnnnnnnnnnnnnnnnnnnnnnnnnnnnnnnnnnnnnnnnnnnnnnnnnnnnnnnnnnnnnnnnnnnnnnnnnnnnnnnnnnnnnnnnnnnnnnnnnnnnnnnnnnnnnnnnnnnnnnnnnnnnnnnnnnnnnnnnnnnnnnnnnnnnnnnnnnnnnnnnnnnnnnnnnnnnnnnnnnnnnnnnnnnnnnnnnnnnnnnnnnnnnnnnnnnnnnnnnnnnnnnnnnnnnnnnnnnnnnnnnnnnnnnnnnnnnnnnnnnnnnnnnnnnnnnnnnnnnnnnnnnnnnnnnnnnnnnnnnnnnnnnnnnnnnnnnnnnnnnnnnnnnnnnnnnnnnnnnnnnnnnnnnnnnnnnnnnnnnnnnnnnnnnnnnnnnnnnnnnnnnnnnnnnnnnnnnnnnnnnnnnnnnnnnnnnnnnnnnnnnnnnnnnnnnnnnnnnnnnnnnnnnnnnnnnnnnnnnnnnnnnnnnnnnnnnnnnnnnnnnnnnnnnnnnnnnnnnnnnnnnnnnnnnnnnnnnnnnnnnnnnnnnnnnnnnnnnnnnnnnnnnnnnnnnnnnnnnnnnnnnnnnnnnnnnnnnnnnnnnnnnnnnnnnnnnnnnnnnnnnnnnnnnnnnnnnnnnnnnnnnnnnnnnnnnnnnnnnnnnnnnnnnnnnnnnnnnnnnnnnnnnnnnnnnnnnnnnnnnnnnnnnnnnnnnnnnnnnnnnnnnnnnnnnnnnnnnnnntctcctttcttgcggagcgggccaaatgcctcggcagtatagatgcatctatggatcgtgccgcacgtccctcggcaatgtacacgacactctggatcggttcgtacgaccacggcgaaaattgtgcctaataataataattacacgatatcttgatattttattacagcttgtgaagctaactggtaaattggaaattattggattctaaagggttaattatttctgctggttaaagaaatttattgttatttatataaatcatgttgatttaaatatctctattttaatattattgacccttagtgagtgtcaaagtcgacctctcgtcactacttatttgaggttaggcttgatacttactaggtacacgttgtttacgtactcatgctacacttgctgcacattttgtttgtgcaggtacgtatatgtctagcggccttgtgggcgcaaaggtgtggttaaatgtggggacttaggtgagttgtattctatattacaatacgcagcaatcagagtctccttcagagttatttatatttttcctgtctaatttgtatttcgaataaatgttgtattttattttactccctagtaaatactcatgcacttgtgacaccgggttttgggagtggttgtgggttgtttagtaatttagttgctaaagtatttattacttactctatgagttctatctttactatttaattgaagaaattttgatttcaaaaatactaaaatgggtaattaagttaattaactatgactggcttgcctgacagcggtgttaagcgccatcacgacttttaatggattttggattgtgacaacatggtatcagagcaataggttcacgtaggtctcacgagtcatgagcaagtctagtagagtcttgtggatcggtacagagacgtctgtacttatcttcaaggggctatggggctattatgagcacttccttttcttgatccctcatcgtgcgatttgattcctttgaggcttatgtctttgtttctttcctattcaatattattcgacgtgaaacgcttgttatcaactaggaatcggggaattttaattgtactatagatgtggtgcaggatgtttttccctgcgtatttgattgggctattatcgtcgtcttgcggaaggtcgctctatcgtttcagctcagtattagtattacttaaggttttgagattgggcattgattgttatgacgatttgtgcgttgctatcgcacaatgttgtgtaatggtatgatgcttgtctatgcgtcgaggcagtgaatgacttgaaaggaggttttacttggtgcatgattcaaagatttattattttatttccggtggagaaaaggcaatcagactacgaatgctcaggtttaggtcgatggggtaacgagacgtggtattttcgagcgtggtgtaaattttcatctgtgatgtgatgacatcgtccttgatggaatgtgttaagttcgccggcgttatggtcttcttcaattcgcctttggggcagaatattgtgaatgatgccggggaagcggctgttaggggtcgcagtgtgctgtctaaccttgtaagagaaaatttaccccataggtgatttaaattaacaattgttgctaattgtgggggggggggggggtnnnnnnnnnnnnnnnnnnnnnnnnnnnnnnnnnnnnnnnnnnnnnnnnnnnnnnnnnnnnnnnnnnnnnnnnnnnnnnnnnnnnnnnnnnnnnnnnnnnnnnnnnnnnnnnnnnnnnnnnnnnnnnnnnnnnnnnnnnnnnnnnnnnnnnnnnnnnnnnnnnnnnnnnnnnnnnnnnnnnnnnnnnnnnnnnnnnnnnnnnnnnnnnnnnnnnnnnnnnnnnnnnnnnnnnnnnnnnnnnnnnnnnnnnnnnnnnnnnnnnnnnnnnnnnnnnnnnnnnnnnnnnnnnnnnnnnnnnnnnnnnnnnnnnnnnnnnnnnnnnnnnnnnnnnnnnnnnnnnnnnnnnnnnnnnnnnnnnnnnnnnnnnnnnnnnnnnnnnnnnnnnnnnnnnnnnnnnnnnnnnnnnnnnnnnnnnnnnnnnnnnnnnnnnnnnnnnnnnnnnnnnnnnnnnnnnnnnnnnnnnnnnnnnnnnnnnnnnnnnnnnnnnnnnnnnnnnnnnnnnnnnnnnnnnnnnnnnnnnnnnnnnnnnnnnnnnnnnnnnnnnnnnnnnnnnnnnnnnnnnnnnnnnnnnnnnnnnnnnnnnnnnnnnnnnnnnnnnnnnnnnnnnnnnnnnnnnnnnnnnnnnnnnnnnnnnnnnnnnnnnnnnnnnnnnnnnnnnnnnnnnnnnnnnnnnnnnnnnnnnnnnnnnnnnnnnnnnnnnnnnnnnnnnnnnnnnnnnnnnnnnnnnnnnnnnnnnnnnnnnnnnnnnnnnnnnnnnnnnnnnnnnnnnnnnnnnnnnnnnnnnnnnnnnnnnnnnnnnnnnnnnnnnnnnnnnnnnnnnnnnnnnnnnnnnnnnggactcaaatcataaattacttgtgataattatatccctatttaattaaagcaatagaattaagacttaggagcgtgtctagaaaagctttttgaagtcagtagtggaatttggcttcaaatggagaaaaataaaattttggtaagtttgactggggagttgactttttgatatcggggtcaaaatccagttctgaaaattttcatatctccgttatgtcatttatgacttatgtacaaaatttgaggtcaatcggacttgatttgataggtttcggcattgaatttagaagttggaaatttttaagttccttaagcttgaattcgggtatgattcatggttttagagttgttttatatgatttgaggtttcaactaagtttgtatgatgttttaggacttgttggtgtatttggttgaggttctaagggcctctggtgagtttcggatggttaataaatcaattttggactttgcattccagctgaagaatgctggttttcagtcactgatttccttctacgcgatcgcatgagaatgtccgcgatcgcgtaggctaagttggagcagtgaaattttatgctatgcgatcgcatgaaggcatccgcgatcgcgtaggtttggccaggctgtgctacgtgaacgtgtggaaaatgccatgttcgcgaagaggaatgaggcagaaggctgggccacgtgtttacactatgcgatcgcgtgtggctgtcctcgatcacgtagcgctgaggatcctgtgcttcgcgatcgcgtagggtcttttctgggcagcttgcaattgcacttcgcgatcgcgggaccttgtctgcgatcgcatataagaaatgactgggcagaatgtttaagttctgatatttactgatttggagctcggggagaggcgattttcgggagtttttctaggaaaacatcagggtaagtattcttaactcaattttggttaaagtacccgaatttatgatagtttttaacatttaattggtggattaagttagaaaaattatgaaaatccttaagtctagatggaagatttgagggtcgatttgatgtcggaatttagtgattttggtatggttggactcgtggttgaatgagcgttttttgggttaaatttcggattttgttagaaaatttatattttcatatggaatttattcctataattagtattgattgaatcgaattaattatgactagattcgagccgatcggagtcagaaaatcgaggaaaaggcatactatttgactgattgagcgtggtttgaggtgagtgacttgtctaactttttgtaggaaaaattccccttaggattggtattgacatgaaaatgttgatgtgttgaaagtcgtataaacgaggtgacgagtctgtacacggactaaatgtggaagattgtatctttaaattttgtagagcactattgcatattaattaaattattttattctgttatatttaccatcattaatatattttcgtatttaaaatttgcctgacctgttcctgctaagtgttttacctatttagttgaaactctgtttcttttattctgtgcattatttgaaggatggatttcttaatttaaatattattaaaaatgaagtattatacatttaaaaattttatatttagacaaggtgttaaatttgtgaaaatattattttttctgaatattttgtgagattttcctactcaatgtgattgagccgtgagatccttattatggaaaatattgttgttgatttattctggcatgagccatgagctctttattgtggaaaatattagtattgttgatttattttggcatgagccgtgagctctttattgtggaaaatattattgttgttgatttattttcgcaagttcaaatatttggacacttgaggtgcaaattgtgatatattgtnnnnnnnnnnnnnnnnnnnnnnnnnnnnnnnnnnnnnnnnnnnnnnnnnnnnnnnnnnnnnnnnnnnnnnnnnnnnnnnnnnnnnnnnnnnnnnnnnnnnnnnnnnnnnnnnnnnnnnnnnnnnnnnnnnnnnnnnnnnnnnnnnnnnnnnnnnnnnnnnnnnnnnnnnnnnnnnnnnnnnnnnnnnnnnnnnnnnnnnnnnnnnnnnnnnnnnnnnnnnnnnnnnnnnnnnnnnnnnnnnnnnnnnnnnnnnnnnnnnnnnnnnnnnnnnnnnnnnnnnnnnnnnnnnnnnnnnnnnnnnnnnnnnnnnnnnnnnnnnnnnnnnnnnnnnnnnnnnnnnnnnnnnnnnnnnnnnnnnnnnnnnnnnnnnnnnnnnngatatttatacgcatgcggtggtataaggtctgggtgttgaaacgcatgcggtaagataagggtggcttgatatgcgtggctagtaggggaactactgctatttcgggaaaaatattttctttaaaaaactttaatatgaaggttcccgtggtgatataagaaaatgagatattgtaaatttatttatgatttgggactacgaggcggtacctcgggagtgcccttattgatatttctttatggctacatttgcctttgattattatttgaccttattctgtgaagttaggttacatactacctacttgattcattttcatttttattttattgttattatattgttaaacattttactatgtcttttattatttccagcaggacctgacctgacctcgtcactactctatcgaggttaggcttggcagctactgggtaccgttgtggtgtactcatagtacgcttctgcacattattttgtattgatctaggtacttcctaccagcccagatatcagtgagttacctgtgtacggagacttcgaggtatatctgccagcgtccgcaaactccggagtcctcttctatccttattatgctgcttttttattttctttagactctgatatatagagaatttgaggaaaaattcttagaagcgtgtgacttattcctaccaggttttaggagttgtaataatgcgaatttgcagatttatttatttcaaacttctattgttattccgcattgagaggattacctagtcttggagactaggtgccatcatgacatcctacgaagggaatttgtggtcgtgacaagttggtatcagagctctaggttcattggtgttatgagtcacaagcaggtttagtagagtctcgcagatcggtacagagacgtatgtacttatcttcggaaggctatggaactgttaggaaaattattcccttctttgattccttatcgtgcgtatttgttgacttcaaaattttaaaccattgtctttctattctctcacagatggtgaggacacgcacannnnnnnnnnnnnnnnnnnnnnnnnnnnnnnnnnnnnnnnnnnnnnnnnnnnnnnnnnnnnnnnnnnnnnnnnnnnnnnnnnnnnnnnnnnnnnnnnnnnnnnnnnnnnnnnnnnnnnnnnnnnnnnnnnnnnnnnnnnnnnnnnnnnnnnnnnnnnnnnnnnnnnnnnnnnnnnnnnnnnnnnnnnnnnnnnnnnnnnnnnnnnnnnnnnnnnnnnnnnnnnnnnnnnnnnnnnnnnnnnnnnnnnnnnnnnnnnnnnnnnnnnnnnnnnnnnnnnnnnnnnnnnnnnnnnnnnnnnnnnnnnnnnnnnnnnnnnnnnnnnnnnnnnnnnnnnnnnnnnnnnnnnnnnnnnnnnnnnnnnnnnnnnnnnnnnnnnnnnnnnnnnnnnnnnnnnnnnnnnnnnnnnnnnnnnnnnnnnnnnnnnnnnnnnnnnnnnnnnnnnnnnnnnnnnnnnnnnnnnnnnnnnnnnnnnnnnnnnnnnnnnnnnnnnnnnnnnnnnnnnnnnnnnnnnnnnnnnnnnnnnnnnnnnnnnnnnnnnnnnnnnnnnnnnnnnnnnnnnnnnnnnnnnnnnnnnnnnnnnnnnnnnnnnnnnnnnnnnnnnnnnnnnnnnnnnnnnnnnnnnnnnnnnnnnnnnnnnnnnnnnnnnnnnnnnnnnnnnnnnnnnnnnnnnnnnnnnnnnnnnnnnnnnnnnnnnnnnnnnnnnnnnnnnnnnnnnnnnnnnnnnnnnnnnnnnnnnnnnnnnnnnnnnnnnnnnnnnnnnnnnnnnnnnnnnnnnnnnnnnnnnnnnnnnnnnnnnnnnnnnnnnnnnnnnnnnnnnnnnnnnnnnnnnnnnnnnnnnnnnnnnnnnnnnnnnnnnnnnnnnnnnnttatatccgatgatcagacactcgtgctccctgttggaatcgcaagaggccgaggccggggcagaggccaaggaaggccacgtggtgtagccagagcacctgcatgagctgctgcagaggagccaccagtagctccagtttgaaagcaggcacccgagacgcctgttactacgcctgcacttgaggagactcttgcctaggatttgagcatgttgggcactctagctcaggcagggttgattctacttgcttcagccatatctcaggccgggggaggagcactaactcccgccgctcgtaccccagagctacgggcccaggttgaccacgccccgaaggttatacaagtgtagccagttgtcccagttcggcccgaggttagggcagcagtttcaaagagggagcagctcaggctcgagaggtacaagaagtaacacccacccacattcagaggtttagcttcagaggatgctcagggttttcttgaggaatgtcactgtatcctctgtactatgggtattgtggattccagtggggtttctttcacgatattccagcttagagaagcgtcctaccagtggtggcatgcatacgagttggacagtccgcctgaggcaactttactcacttggaatcaattttcatatatgttcttgagggagtatgttcctcagagtcttagaaatgcatggcgcacaaagtttgagcagctgcgccagggttctatgaccgtgtcaaaatatgctgtctgatttagtgatttggctagatatgcagcagccttagttgctactgttcgagagcgggttcattgatttattgaggggctccacctttgtattagattcagtatggcccgagaaccgaagatggacatcacataccaacaggtagtgtcaattgctaggagattggagggtatgcgaaatcaggagagagaagaaagggaagctaagagacctcgggattctggaacatataacagttctcgtgccccagctacagcctgtcatggtagaggctatgtgagtcgtcctattatttcagcactttcagtggtattccggctactcccagacctcaagttccatattatgcaccgccagtgtctattgtacctcctatacagggtgctttcagtcagcagtccagtcgatcaggcccgtgccagtcccagcagccacgtcctcctagggcttattttaagtatggtgacactcatcatattatgggggattgccccagacttaggaggggtgcacctccacaaatttctcaggccccacctattccacagggccctcaggcttctcaagccatgatcactgcacaagtttctactccacccgcatagccatctaaaggtggaggtcggacaggtagaggttgccctagagggggaggccaggccagatattatgcccttcctactaggacggaggcagttgcatcagattctattatcataggtattattccagtcaggctccacttattcttatgtgtcatgttattttgccctatatttgggcgtatcccgtgactctttaagttctttagtttatgtatctacacccgttggtgaatctattattgttgaccgcgtgtatcgatcgtgtttgattgttatctgaccagagctgatttattattgctcagtatggtggatttcgatattattttgggcatggaatagttgtttccctatcaagctatcattgattgtcacgccaagacggtgacattggctatgctaggtctaccgcagctagagtggagaggtaccttggatcatgttcgtagcagggttctttcatttcttaaggatcaacgaatggttgataaggggtgtgatacgtatttggcctatgtgatagatgttagtgttgatactcttaccgtggagttaattcctgtagtaagagattttcctgatgtagttccagcggatcttccgggtatgccacccgacagggatattgactttggcattgatttgttaccgggcactcaacccatttttatttcaccatatcgtatggtcccaatagaattgaaggaattaaaggtgcagttacatgagctgcttgataagggttttgttcggcccagtgtatcgcatttgggagctcctgtcttatttgtgaagaagaaggatggttctatgcggatgtatattgattaccgccagttgaacaaggttacagtgaagaacatgtatccattgcctcgtattgatgacctatttgatcagcttcagggtgccagagtgttctctaagatcgactgcgttcaggctatcgtcaattgaagattcgggagccagatatcccgaagactgcttttaggactcggtatggtcattatgagctccttgtaatgtcatttgggctgaccaactccccagcagcatttatgcatttgatgtacagtgtattccggtcctgtatttactccttcgtcattgtgtttattgacgacattatggtgtactcccggagcctagaggatcatgaacaacacctgaggactgtgcttcagactttgagagaaaagaagttgtatgcaaaattttcaaagtgtgaattctggcttgnnnnnnnnnnnnnnnnnnnnnnnnnnnnnnnnnnnnnnnnnnnnnnnnnnnnnnnnnnnnnnnnnnnnnnnnnnnnnnnnnnnnnnnnnnnnnnnnnnnnnnnnnnnnnnnnnnnnnnnnnnnnnnnnnnnnnnnnnnnnnnnnnnnnnnnnnnnnnnnnnnnnnnnnnnnnnnnnnnnnnnnnnnnnnnnnnnnnnnnnnnnnnnnnnnnnnnnnnnnnnnnnnnnnnnnnnnnnnnnnnnnnnnnnnnnnnnnnnnnnnnnnnnnnnnnnnnnnnnnnnnnnnnnnnnnnnnnnnnnnnnnnnnnnnnnnnnnnnnnnnnnnnnnnnnnnnnnnnnnnnnnnnnnnnnnnnnnnnnnnnnnnnnnnnnnnnnnnnnnnnnnnnnnnnnnnnnnnnnnnnnnnnnnnnnnnnnnnnnnnnnnnnnnnnnnnnnnnnnnnnnnnnnnnnnnnnnnnnnnnnnnnnnnnnnnnnnnnnnnnnnnnnnnnnnnnnnnnnnnnnnnnnnnnnnnnnnnnnnnnnnnnnnnnnnnnnnnnnnnnnnnnnnnnnnnnnnnnnnnnnnnnnnnnnnnnnnnnnnnnnnnnnnnnnnnnnnnnnnnnnnnnnnnnnnnnnnnnnnnnnnnnnnnnnnnnnnnnnnnnnnnnnnnnnnnnnnnnnnnnnnnnnnnnnnnnnnnnnnnnnnnnnnnnnnnnnnnnnnnnnnnnnnnnnnnnnnnnnnnnnnnnnnnnnnnnnnnnnnnnnnnnnnnnnnnnnnnnnnnnnnnnnnnnnnnnnnnnnnnnnnnnnnnnnnnnnnnnnnnnnnnnnnnnnnnnnnnnnnnnnnnnnnnnnnnnnnnnnnnnatggtaacgaacaaggggatccaggtagatccgaagaaaattgaagcagtacagagttggcccagacgttatcagctaccgagatccggagtttacttgtcttggcgaggtattatcgctgatttgtagagggtttctcttctattgctacacctatgaacagattgacccagaagggtgatccgtttagatggaccgaggattgtgaggagagctttcaaaagctcaagacaactttgactacagccccattattgctattgcctataggttcagggtcttatacttataaaccagtttgatgtcacgactcaaaatcccaccacatgcatcgtgatggcacctagtctcttagactaggtaagccgatttcaattacattttgaagcaatttttttaattaaataagtaaccaaaactaacagcggaataaatatgaatatacaactgcccaacactggtagtactgagtcacgaactctaactgaatacatggaatgatcacgaggaccgaatatgcaatactgtttgattataaattaacagtacaataaaatgaaaagaccccaagggactgcgacgtccaagcagctctaccttgaatccttacgatcccgctttaactctgctcaagtccgatatctccaatacctggctctgcacaaaaatgtgcagaagtgtagtatgagtacaccacggtcggtatccagtaagtatcaagactaacctcaatggagtaaagacgaggtacagtcaagacactcactagtttaataacctgtgcaatataatatacaaaataataggaaacaaataatatcaaggcaacataaaacaaccaatgatatgcacagtaagacaatgaaatcaccatttaatatctctcaacaattaataaatacaattacacccagttaaatcaagttcttcaattaaatatctttcacatataattcttacgaataaaactctttctcaaatataatttcgtcgaataaatatctttcaaatataattctttcatataattattcttgaataaaaatcctttcaaataaatattttgaatatagttctttcgattgaagagtcaccatgtgacacctcatttcaaaatcataaaaatacgggtcttggcccattttcatatttttcgtaaacacgggtctcaacccatttttcatattttcacgacacctcgtgcccataattaaatcatcatatttttcctgcacctcgtgcccttatttcatatcacaacggcacggacaattcacgtgccaaatatcatcattatttactcacggcacctcgtgcccacatttcattttataatccacctggcaataaccacaggctctcaatttcaacataaatcagattgttattaatttaccaacaacaaaacaaattgcacaaggtataaaaataaacacaagaaaatcacaacatcacatgaaaatcatcaacaccacaaccctacatcatcacatatcgtccctgacaatagccatccttatcgctcctattgccacccttatcgctcctatagccacccttattgtgatgaaatgataatgatattggcacgtgaattgtccgtgcagttgtgatatgaaatgagggcacgaggtgccgggaaatatgatgatttaattatgggcacgaggtgccgtggaaatgggcgagacccgtgtttacgaaaaatatgaaaatgggctgagacccgtatttttatgattatgaaatgaggtgtcacatggtgactttttaattgaaagaattatattcaaaatatttatttggaaggatttttattagaaagtattatattgaaagaattatatttgaaaaataattatttgagaaaattatatttgaaagagagttatttggaagaattatatgtgaaagacatttatttgaaggacttgatttaattgggtgtaattgtatttattaattgttgagtgatattaatggtattcttgttgtctgttgtgcatatcactggttgttttatcctgcccttattattatttgtttcctattattttgtatattatattgcacaggttattagactagtgagtgtcttgactgtacctcgtctctactccattgaggttagtcttgatacttactgggtaccgaccgtggtgtactcatactacacttctgcacatttttgtgcagagccaggtattggagatatcggacttgagcagagttaaagcggatcgtaaggattcaaggtagagctgcttggccgtcgcagtcccttggagtcttttcatttcattgtactgttaatttgtaatcaaacagtattgtatattcggtcctcgtgatcattccatgtattcagttagagttcgtgactcagtactaccagtcttgggaggttgtgtattgtaattatttctgtgtttttttatttaaaaaaaaatggcttcaaaatgtaatagaaatcggcttacctagtcttagagactaggtgccatcacgacgcctgtggtgggattttgggtcgtgacaagttggtatcagagctctaggttcataggttctacgagtcacgaacgagtctagtagagtcttgcggatcggtacggagacgtctgtacttatcttcgagaggctacagaactgttaggaaatttccatttctttcattcctgtcgtgcggaatttgttgaatttggaatttgagcctttgtatctctattctctcacagatggtgaggacacgtgctaccgggttagctgagcaggcatccgcatactgctagggctgcaagaggcccgaggtagaggtcgaggaagggcacgtgctgcgactagagcacctgtcagaacaacagttgaggagccaccagtagctccagttgggggacaggtaccagaagcacctgttgttacccccggacttcaggagactttagcacagttcctgagtatgtttggtacattaactcaggcgggattgatctctgttgcaccaaatattccgcagattgggggagtagctcagactcctaccacaactccagagcagcaggttcacgttggtcaggttccgggtgtagtaccggtacaacctgttattccggttcggcctgaggtcaggccagaggcatcagaagaagaacaaaagagacttgaaaggtttaagaggtatagtccacctactttcagtggcacaactacagaggatgcccaaggatttctagaaaattgtcaccgtattctccgcaccatgggtattgtggaagtgagcggagttgcctttactacatttcaactgtcaggcgcagcgtatcggtggtggcaaatctatgaagaaggtagaccagccgatgcaacaccaccaacttgggctcaattttcggaaatgttcttgaaagagtttgttccccagactctccgagatgcgtggcgcacagagtttgaacggttgcgtcagggcactatgacagtgtcagaatatgctatcaggttcagtgagttagcccgtcatgcacctatcttagttcctacaatcagagaacgggtccgcagattcattgaggggctcgattatgatattaaaatatgcatggctcgagagttgcaaactgatgctccatttcaacaagtagtggagattgcaaggaagattgagggtgttttaggcgaggaaagggagtctaaggaggccaaaaggtctcgaagatctggagggttcagtggattttactcttcagctagaacccattatagcggaggctcgagcagtcggtcagctcagtccgcacatcagattactcgggtgctccagtttatagtgcaccaccgacacgagattcttacagtggttattccagttatccggcacagactcagtacgagcagccgacctcagaggggttgttatgagtgtggtgatactaggcatatcatgagagattgtcccagacttgggaggggtggatttcatcagaacactccagctacaagctttattccagttgatactccacgtgcacagtcagctagaggtggaggacaggcgggtagtgggcgcctaagaggtggaggcccgacccgttgatataatcactatgatttggctgaggccaatacaccagatggtgtcgttacaggtacgatcctgatttttattataaaaggatattttccttaatttgattcggttctgaatattgaggtgagtcctcctattatgctccacttatgggtgagcttcgtaaatttgtgacccacttatatgtttatccctgttgggagatttaaagatgtgagcccgtgtctgtcattttatttttgtacaccattgagggctataagtccaaaagtaatttttattattcattacagtgggtttaatgtgtttcggaataattgattccaatttttatgaattatatgccctaccggtatgagggttcattatatgttgtgaaaatttttatgaaatatattgaaaagaagaaagaaaggaaattgaaaatttcagttggcacaatgtgcaacatacttgtgattcggagttgaggatgagatcctcgcatttttacatgatgtgaaatatttaaaccgggctgcaagtggaagttatgtaaggacgaggtccttgtggtgaaatatttatgagtttaaaatttttcctttgtgaaatttaattgtacaatagtattaatagggagtcatgcctgttaggcttatttgataattcttgtatatttttctgtgcatattcagccattttcgtgctgtaaacattgagttttaacctatgagatgagtgcccaggtggcgttaaatgtgactcattaatccgagtaagcaatcatgaggtcttcatgcctcacattctgttgtcagtgttgtgaaaattcgaaatgaggtggtggttaatatgagattaattgatgatgctggaattaattatgaacaacttttaagaccagagatgtggtgatgagcatacatatgatgtgcttcatgtcctgatatcattatgataatgcagtgcttgtaatgctgagattggtgttattgatatataccttgtggtattttgttgggttgtggatgtgttgttaggagttgttttggtgttactctggcaggtggataggcccaattacaggggagactctgccgaaatttctgaaaaatttgggagttagtaaaatttgaaggattgagaattgcaaaggaagagataaattatgttatgtgtttgagggcgaatgatcctaagcggggaagaatgtaaacccagaaaaagttttgaagtacttcaacactatcaagaaagttgatgtgtgcataggcacgagttgctatagccagttgagactaataccgtgcgtcgaagtgaaaatcaggcattttggaaatgattggagagttagggattttgcttaaagcttacaagaatggagaaaagaaataatctcaaatgagatggtgttgtcgggcttatctcaaatgcgtaacgtgggatcaaccgtgagtatatgtgtaaaagtaaaatcatcaatttggtaacctcagaataattcttagcacgttcgaggacgaacgtttgtttaagaggtggagaatgtaacgacccgacttgtcattttaagaatttatgcccgttcagtgacttaaggtctcgagcagcctcgcaatatgtattatgacccgcgtgtgtggtcgagtttgatttacggatgattcggagtgatttgggacacttagtccctaagacggaagcttaagtcttaggattttgaccgtagtcggaactgtgtgaagacgactccggaatggagttccgtcggttccgttagctccgttgggtgattttggacttaggagcgtgtccggactgtgaatctgaggtctgtagccaatttaggcttgaaatggcgaaagtcgaatttttggagaattggaccggaagtggactttttgatatcggggtcggaatccgattccggaagttggagtaggtccataatgtcaattatgacttgtgtgcaaaatttgaagtcattccggattgatttgatgtgtttcggcacaagttatagaatttgaaagttcaaagttcatagattttgatttggggtgcgattcgtcgttttgatgttgtttgaggtgatttgagaattcgactaagttcgtatgatgttttaggacttgttggtgtatttggttgaggtcccgggggcctcgggtgtgtttcggggtggtttcggatcatttcgggctgtttcggaactgctgtatctggtatctgacttccttcttcgcgaacgcgaagagagtcacgcgaacgcgaagaggagttttgaggctgctgggatttggccttcgcgaacgcgaaggagggctcgcgaacgcgaaggtatgcctgaagaacctacgcgaacgcgaggggccagtcgcgaacgcgtagaaggaaggaggggactgggcctggagtcatcagccttcgcgaacgcgaagcttcaatcgcgaacgcgaagcagtaggacctgagtgcatcgcgaacgcgagagcttgaacgcgaacgcgatgatatgcatggcaggccttcgcgaacgcgacgctggtaacgcgaacgcgaagaagaatttgaggcagcgagtttttggccttcgcgaacgcgagacagaggtcgcgaacgcgaagaaggcctatctgggcagaattaaaagtcccaaaaatgggggtttgagttcataactcaaaatctaattgggagctcggtagaaggcgatttttggagagattcttgcgtgggtgtttggggtaagtgattcttatccagttttgattaatttccatgattatgtctttgaatccatcatttaattcggatttaatggaggaaaaatcaagatttttgtaaaatcttccaaaaacgaaaaatttaagatttggaagtcgagttgttattggaattcgataaaattggtatggttgaactcgtatcggaatgggtgttcggatttcatgaaaattatgtcgggttccgaggggtcccgcgttgacttttgttgactttttggaataaatttttaagtcgacgtattattatccggaattatttccgatgaattttaatgaagttatacaattaatttggatagatttgagctgtccggaggtcaattcaagcaagaaggctattttggaatatcggcctaacttcaaaaaggtaagtgtcttgcttaacctcgagtgggggaattaccccttaggcattgagtcttatgtgccatttgtgaaatgtgaaaagccgtgtacgcgaggtgacgagtacgtactcgggcttatacgtgcaaaaattcattgaattaaagtcttaggcattattgtgtagtaaattggaaaattgtggaaaattattaaatcatctgtttgccatgcctaaatccttattgttgaatttgtttttatatgataatttgatgtgattgttacttgaaatatttatgaaatttcgtgagtattgttggtttaatatttcttggaaattaattccaatatgaattttcttatgcaaataattaatttaagcgagcttaagaataagtgttaatataattatctaaatttgcattaatgaaggttttgctttatgctgagtaatttctatctctattgattgtttttgggtgttatatacattgtgtggagccttgggctatttgttgtgaaattaattgattttgttatatctttggaatttggttgtggccattgggcaaattgtgatatgaattgattttattatattgtgtgtaattttccgtgtaaattgttgtgttgtgtgagttattattttggtgctccgtccagacaatatcaatagccacccttatcgctcctattgccacccttattgctcctatagccacccttatcgctcagcccagacaatattccaacaaacacaacaacattgatatgccacccttatacccacataatatcaacggtgaaatgccaccctttatctctccaaaataataactcacaaaacacaacaatttacacggaaaattatcacggtaacataacaaaatcaattcatatcacaattttcccaatggccacaactaaatcccaaagctacaaccaagtcaattaatttcacaaaaaatagccaaaagctctacacaatgtatacaacacccaaaaacaatcaatagagatagaaattactcaacataaaacaaagactatattaaattcaaattttcaataattatataaacacctcttcttaagctcatttaattaattatttgcagaggcaaaatccataatgaaattaaattccaataattatcaaaccaacaaattaacggaattacataaataatcaagtaacgatcacataaaattatcatataacaacatattcaaaaataacaaagatttaggcacaacaaatatatgattaaatatataccaacaattacccaatttaccacacaatatgctcaagactttaactcaatacaatttacacatataagccgagtacgtactcgtcacctcgcgtacacgtcttttcacattttacaaatggcacataagactcgatacctaaggggtaattcccccactcgaggtttagcaagacacttaccttttgaagttatgccgatattccaaaatcaccttcttgcttgaattggcttccagaccgctcaaatctattcaaatcagttgtataacttcattaaaattcatcggaaataatttcggataataaaacgtcgacttaaaacaatattccaaaaagtcaacaaaagtcaatgagaggcttgcccctcggaatccgataaaattttcatgaaatgcgaacacccattccgatacgagttcaaccataccaattttatcgaattccaataaaaactcgacctccaaatcttaaatttgtggtttatgaagtttctacaattgtttccaactttccatctgaaagtactaattaaatgatgaaatcagtgatatattcatgtatattaaccaaatccgagttagaatcacttaccccgatgaatttcttgaaaaacccacgaaataacgtctcaaactgagctcccaaagtccaaaaatgaaataataacctcaacctcggatatatagtacatcctctgaacttccaatgtgcggtccgtacaaaaatggcgtggctgcaatccccagctcctgcggtcacacaaaaatggtgcggccgcactttacagccttttcttctaccaggcttcagtaaattggccataacgtttctctacatatgttctaattatgatttctttatctttctggaacctagatatgaagggctacaactttcgtttttgaatcatctcaaaattccttgtagatcaaaagatatgagcttctgaagtcggaccagcaaatctgagagttcttgagcgcggctgcacacaaaattgtgcggtctgtgaactctactacggactggagcacggttcgcacctgaattgtgcggtccgcgaaattcccctaaggtccgcacttccctttttgcctcagcactcccgaaactcatacggaacctcgtggacacaaaccatatatgaatttcaatcataaaacacgctacggacctgctcgcgcactcaaaacactgaaaagaggtcgtcttgactcgatattgactatggccaaactcccaaatttcttaactttactaatctctcagccaatgatccaaaaatacacccaagcccctcggaacctcaaccaaatataccaacacgtcccaaaatacaatacgaacttagttgacgcttcaaatcttgtcaaacaacataaaaattacgaatcacgcatcgaatcgaatataagtttttcaaatcttccaacttatatattttgcgccgaaacgtatcaaatcaatttggaatgacttcaaattttgcacctaagtcataatttacgtaatggagctattcccatttccggaatcgaaatccgacttcgttatcaaaaatttatccttcggtaggattttccaaaatcttctatttttttcaactttcaccaaaatgcgtcgaattatcctacagacttccaaatccgaatcaggacatatgtcaaagtccgaaatcaccatacgaagctattgacatcatcaaaattctattccaaagtcgtttgctcaaaagtcatctctccggtcaactctttccattttaagcttctaaaaaagaattgttcttttaattaaattccgaatcttctgaaaatcaaacttgaccacacccacgggtcataatacttattacgaagttgctctagaccttaagtcactgaatggggggttaattcttaaaatgacaagtcgggtcgttacattctccacctcttaaacaaatgttcgtcctcaaacgtgctaagaattattctgaggttaccaaattgatgattttacttttacatatatactcacggttgatcccccattaccgcatttgagataagtccgaccacatcatctcatttgagattatttcttttatccatatttgtaaactttaagatcaatttcttacactccaaacattttcaaaaggcctgatnnnnnnnnnnnnnnnnnnnnnnnnnnnnnnnnnnnnnnnnnnnnnnnnnnnnnnnnnnnnnnngcacggtattagtctcaactggctatagcaacttgtgcctactcacacatcaacctttttgatagtgttgaagtacttcaaaaaatttcttgggtatttcattcttccccgcttaggatcattcaccctcaaacacataacataatttgtctcttcttttgcacgccccaatcccccaaatttttactaactcccaaatattttagaattttcgacatagtttcctctgtaattgggccaatccacctgccagagtaacaccaaaacaactcctaacaatacatccataacccaacaaaacaccacaaggtatatatcaataacatcaatctcagcattacaagcgctgcattatcataatgatatcaggacatggagcacatcatatgtatgcccatcaccacatctctagacttaaaagttgttcataattaattccagcatcatcaatttatctcatattaaccaacacctcattttgaattttcacaatagtgacaacagaatgtgaggcatgaagacctcatatctattcacccgacttaacgagtcacatttaacgccacctgagcactcatctcataggttaaaacttaataattacaacacaattatgccacataaatacataaaagaattatcacttaagcctatgaggcatgactccctattagtactatagtacaatttaaacttcacacagggagaattttaaactcataaatatttcaccacaaggacctcgtccttatataacttccaccgcggcttgtagcccagtttaaatatttcacatcatatnnnnnnnnnnnnnnnnnnnnnnnnnnnnnnnnnnnnnnnnnnnnnnnnnnnnnnnnnnnnnnnnnnnnnnnnnnnnnnnnnnnnnnnnnnnnnnnnnnnnnnnnnnnnnnnnnnnnnnnnnnnnnnnnnnnnnnnnnnnnnnnnnnnnnnnnnnnnnnnnnnnnnnnnnnnnnnnnnnnnnnnnnnnnnnnnnnnnnnnnnnnnnnnnnnnnnnnnnnnnnnnnnnnnnnnnnnnnnnnnnnnnnnnnnnnntggatctcgtcctcaactctaaatcacaggtgttttgcacattgtgccaactgaaatttcaatttcttttctttcttctttttaataaatttcataaacatttttcataacacataacgaaccatcataccggtagggcatataattcataaaaattggaatcaattattccgaaacacattaaacccactttaatgaataataaaattacttttggacttatagccctcaatggtgtacaaaaataaaataacagacacgggctcacatctttaaatcttccaacagggataaacatataagtgggtcacaatttacaaagctcacccataagcggagcatattaggaggacttacctcaatattcagatccgaatcaaattaagggaaaatatcttttttataacaaaccaggatcatacctgtaacgacaccatctggtgtatcggcctcagccaaatcatatcgattatattaacgggtcagacctccacctcttaggcgtcctctacccgtctgtcctccacccctaactgattgtgtacgtggagtagtaactgcattggggcccatagactgagtgttttgataaaatccacccctctcaagtctgggacaatctctcataatgttcctagtgtcaccacactcataacagcccctctgagatcgcgattgctcatactgagtctgtaccggataactggaataaccattataggaatcccatgtcggtgttgcattgtaagaacttactggagcactccgagtaatctgatgtacggactgagctggccgactactcgaccctccgctataatgggtcctagatgaagagtaaaatccactgaaccctctagatcttcgagaccttttggcccccttagactccctttcctcgcctaaaacaccctcaatcttccttgcaatcttcattacttgttgaaatggagtatcagtttgcaactctcgagccatgtatattttaatatcataatcgagcccctcaatgaatcttcagacccgttctctgattgtaggaactatgataggtgcatgacaggctaactcactgaacctgatagcatattttgacactgtcatagtgccctgatgcaaccattcaaactctgtgtgccacagatctcggaaagtttggggaacaaattctttcaagaacatttccaaaaattgagcccaaattggtggtgttgcattggctggtttaccttcttcatagatttgccaccaccgatacgctgcgcctgacagttaaaatgtagtaaaggcaactccgctcacctccacaatacccatggtgcggagaatacggtaacaattttctagaaatccttgggcatcatgtgtagctgtgccactgaaagtaggtggactatacctcttaaacctttcaagtctcttttgttctttttctgatgcctctggtctgaccttaggccgaaccggaataacaggttgtaccggtactacatctggaacctgatcaacgtgaatctgctgctctggagttttggtaggagtctgggctactcccccaatctgcgaaatattacgtgcaacagagatcaatcccgcctgagttaatgtaccaaacatactcaggaactattctaaagtctcctgaagtttggtggtaacaacaggtgcttctggtacctgtcccccaactggagctactagcggctcctcaactgctgttctgacaggtgctctagtcgcgacacgtgcccttcctcggcctctacctcttgtggccctagcattatgcgtgggtgtctgctcagctgacccggtagcacgtgctcaaattacaaattcaacaaattccgcaaaacaggaatgaaagaagtggaaatttcttaacagttctttagcctcttgaagataagtacagacgtctctgtaccgatccacaagactctactagacttgttcgtgactcgtagaacctatgaacctaggactctgataccaacttgtcacgacccaaaatcccaccacaggcgtcgtgatggcacctagtctctaagactaggtaannnnnnnnnnnnnnnnnnnnnnnnnnnnnnnnnnnnnnnnnnnnnnnnnnnnnnnnnnnnnnnnnnnnnnnnnntttctttttgaattaaataagtaaccaaaactaacagcggaataaatatgaatataaaacctcccaagactggtagtactgagtcacgaactctaactgaatacnnnnnnnnnnnnnnnnnnnnnnnnnnnnnnnnnnnnnnnnnnnnnnnnnnnnnnnnnnnnnnnnnnnnnnnnnnnnnnnnnnnnnnnnnnnnnnnnnnntgaggaccgaatatgcaatactgtttgattacaaattaacagtacaatgaaatgaaaagaccccaagggactgcgatgttcaaccatctctaccttgaatccttacaatcccgctttaactctgctcaagtccgatatctccaatacctggctctgcacaaaaatgtgcggaagtgtagtatgagtacaccatggtcggtacctagtaagtatcaagactaacctctatggagtagagacgaggcacagtcaagacactcactagtttaataacctgtgcaatataatatacaaaataataggaaacaaataaaatcaaggcaacataaaataaccaatgatatgcacagtaagacaataaaatcatcgtttaatattgctcaataattaataaatacaattacacccagttaaatcaagtacttcaattaaatatctttcacatttaattcttacgaataaaactctttttcaaatataattctttcatataagtcttcttgaataaaaaacctttcaaataaatattttgaatataattcttttaattaaagagtcaccatgtgacacctcatttcaaaatcataaaaatacggatctcaacccattatcttatttttcgtaaacacgggtctcagcatatttttcatatttccgcggcaactcgtgcccataattaaatcatcatatttccccgacacctcgtgccctcatttcatttcacaatggcacggacaattcacgtgccaaatatcatcattatttactcatggtacctcgtgcccacatttcattttataatccgtctggcaatagccacaggctctcaatttcaacataaatcaaattgttatcaatttaccaacaacaagataaatttcacaaggtataaaaataaacacaagaaaatcacaacatcacatgaaaatcataaaacaccacaaccctatatcatcacatatcgtccctgacaatagccacccttatcgctcctattgtcacccttatcgctcctatagccacccttatcgctcctattgtcacccttatcgctccgatagccacccttatcgctccgcccagacaatatcaatagccacccgtatcgctcctatagccaccgttatcgctccacccagaaaatattccaactaacacaacaacagtgaaatgccactcttatacccacataatatcaacggtgaaatgccacccttatctccccaaaataataactcacaaaacacaataatttacatggaaaattatcacggcaacataacaaaatcaattcatatcacaatttgcccaatgaccacaaccaaatttcaaagctacaaccaagtcaattaatttcataacaaatagccaaaagctccacacaatgtgtacaacacccagaaacaaccaatagagatagaaattattcaacataaagaaaagtcttcattaaattcaaattttcaataattatataaacacctcttcttaagctcatttaattaattatttgcagaggaataattcataatgaaattaaattctaataattatcaaaccaacaaattaacggaattacataaataatcaagtaacaatcacatcaaattgtcatatacacaacagattcaacaacaacaaggatttaggcacgacaaattgattaaatatatgccaacaattacccaatttaccatacaatatgctcaagactttaactcaataaaatttacacatataagtcgagtacgtactcgtcacctcgcgtacacggcttttcacatttcacaaatggcatataagactcgatgcctaaggggtaattcccccactcnnnnnnnnnnnnnnnnnnnnnnnnnnnnnnnnnnnnnnnnnnnnnnnnnnnnnnnnnnnnnnnnnnnnnnnnnnnnnnnnnnnnnnnnnnnnnnnnnnnnnnnnnnnnnnnnnnnnnnnnnnnnnnnnnnnnnnnnnnnnnnnnnnnnnnnnnnnnnnnnnnnnnnnnnnnnnnnnnnnnnnnnnnnnnnnnnnnnnnnnnnnnnnnnnnnnnnnnnnnnnnnnnnnnnnnnnnnnnnnnnnnnnnnnnnnnnnnnnnnnnnnnnnnnnnnnnnnnnnnnnnnnnnnnnnnnnnnnnnnnnnnnnnnnnnnnnnnnnnnnnnnnnnnnnnnnnaaggttaagtatgacacttacctttttgaagttatgccaatattttaaaatcgccttcttgcttgaattggcttccggaccgctcaaatctattcaaatcagttgtataacttcattaaaattcatcgaaaacagttccagataataaaacgtcgacttaaaaatttattctaaaaagtcaacaaaagtcaatgcggggcccgcccctcagaacgcgacaaaattttcataaaatctgaacacccattccgatacaagttcaaccataccaattttatcgaattccaataacaaatcgacctccaaatcttaaatttgtgatttatgaagtttctataattttcccaaatttccatcttaaagtactaattaaatgatgaaatcagtgatatattcatgtatattaaccaaatctgagttagaatcacttaccccgataaatttcttgaaaaaaccacgaatatcgtctcaaactgagctcccaaagtccaaaaataaaataataacctaaacctcggatatatagtacatccatagaacttccaatgtgcggttcacacaaaaatggcacggctgctcctgcggtcgcacaaaaatggtgcggccgcacttcacagccttctcttctattaggatttagtaaattgaccataactttctctacagatgtcagaattatgatttcttaacgtttttggaagctagacacgaagggctacaactttcattttcgaatcatctcaaaattccttgtagatcaaaagatatgagcttctgaagtcagaccagcgaatctgagagttcttgagcgcggccgcacacaaaattgtgcggtccgcgaactccactgcggattggagcacagtccgcacctaaattgtgcggttcaagaaattcccctgaggtccgcacttccctttttgcctcagcactctcaaaactcatccggaacctcacggacacaaatcatatatgaatttcaatcataaaacacgctacggacttgctcacgcactcaaaatactgaaaagcggtcgtcttgacccgatattgaccatggtcaaactcccaaatttcttaactttactaatctcttaatcaatgatccaaaaatacaccaaagcccctcgggacctcaaccaaatatactaacacgtcccaaaatataatacaaacttagtggaggcttcaaatcttgtcaaactacgtaaaaattatgaatcgtgcatcgaataaaatataaatttttcaaatctttcaacttctatattttgcgccgaaacgtatcaaatcaattcggaatgacttcaaattttgcatccaagtctaattgacgtaatggagctattcccattttcgaaatcaaaatccgacctcgttatcaaaaattcatctttcggtaggatttttcaaaatcttctattttttttaactttcgccaaaatatgtagaattgtcctacggacttccaaatctaaattcggacatacgtcgaaattcaaaattaccatacgaagttattgacatcatcaaaattctattctgaggtagtttgctcaaaagtcaactctcaggtcaactctttccattttaagtttctaaataagaattgttcttttaattaaatttcgaatcttccgaaaatcaaacttgaccacacccgcgggtcataatacttattacgaagtttctcgagagcttaagttactgaactgggcgttaattcttaaaatgacaagtcgggtcgttacatttgaccagcttataagattagccaaacaccctctaaaaagcctcaattttaaataatgcaaatagtatggagataaaatatggaaaaaaataccctatctgaaatacagaaaattttagtataatatgttgaataatggagttactatgtataaacttccagcatattatgttggaactccagtacattatgctggaatcttatgtgtaaaaaatttgagctccaacatattatgctagatttcttttcgtattttaaggatatttttgttcaggttttattttacataaaaaaatagctaaattttgattacctttgaaactacggctaattttctattagctcatgtaaatcaagctgtttgtttttcctttttaaatgggctaaaaagccagcccaaccgaatgtaattataccatgctaagttcagttggctcgataggtcaagttcattttgacaactttattaagatgtttttacatgatgatcttttttaaagagttagtaatataaatggtattacttttgttttattccaaaaatagcaaaatcatttatcattgtggcttattttaaaatctcatacgtttaattgcctacatattttaaaagattcattaattaatgaatcactaattaagggatgaatcattaacttattctcctttatccctctcaaaacctaatctcgttttctcttcccttcatacaaacgactccattcactctctcccttcttatttttcatctgtatgtttttcaacttgaccataatggctccttcattattacataaatatattatgaataatatgttatgtatttttatatattctataaatataccaagaatatgctctagctaaaataaatatgcgcaaacacatatagattatatcattgttgtattatttatataattaaatattnnnnnnnnnnnnnnnnnnnnnnnnnnnnnnnnnnnnnnnnnnnnnnnnnnnnnnnnnnnnnnnnnnnnnnnnnnnnnnnnnnnnnnnnnnnnnnnnnnnnnnnnnnnnnnnnnnnnnnnnnnnnnnnnnnnnnnnnnnnnnnnnnnnnnnnnnnnnnnnnnnnnnnnnnnnnnnnnnnnnnnnnnnnnnnnnnnnnnnnnnnnnnnnnnnnnnnnnnnnnnnnnnnnnnnnnnnnnnnnnnnnnnnnnnnnnnnnnnnnnnnnnnnnnnnnnnnnnnnnnnnnnnnnnnnnnnnnnnnnnnnnnnnnnnnnnnnnnnnnnnnnnnnnnnnnnnnnnnnnnnnnnnnnnnnnnnnnnnnnnnnnnnnnnnnnnnnnnnnnnnnnnnnnnnnnnnnnnnnnnnnnnnnnnnnnnnnnnnnnnnnnnnnnnnnnnnnnnnnnnnnnnnnnnnnnnnnnnnnnnnnnnnnnnnnnnnnnnnnnnnnnnnnnnnnnnnnnnnnnnnnnnnnnnnnnnnnnnnnnnnnnnnnnnnnnnnnnnnnnnnnnnnnnnnnnnnnnnnnnnnnnnnnnnnnnnnnnnnnnnnnnnnnnnnnnnnnnnnnnnnnnnnnnnnnnnnnnnnnnnnnnnnnnnnnnnnnnnnnnnnnnnnnnnnnnnnnnnnnnnnnnnnnnnnnnnnnnnnnnnnnnnnnnnnnnnnnnnnnnnnnnnnnnnnnnnnnnnnnnnnnnnnnnnnnnnnnnnnnnnnnnnnnnnnnnnnnnnnnnnnnnnnnnnnnnnnnnnnnnnnnnnnnnnnnnnnnnnnnnnnnnnnnnnnnnnnnnnnnnnnnnnnnnnnnnnnnnnnnnnnnnnnnnnnnnnnnnnnnnnnnnnnnnnnnnnnnnnnnnnnnnnnnnnnnnnnnnnnnnnnnnnnnnnnnnnnnnnnnnnnnnnnnnnnnnnnnnnnnnnnnnnnnnnnnnnnnnnnnnnnnnnnnnnnnnnnnnnnnnnnnnnnnnnnnnnnnnnnnnnnnataattagatatgctatatgccagaaattatttcataaatatataatgaatatattatatactatatatatttttagtataattaataatattttttagatctcgtttgttgtataaatcataattatagctcatacatataccacgtatttttttgtgaattataggatttggtattttaaatttatatttatcttggttcacacttacatacacacaccataatcatatcgtgtataactatcagaatatcgcatttgcttgtgatagtataagattattataaaacaaaaattgtaacactaagcaagaggcatatttttggaagaaaaaaaaaagaaaaaaaagaaagaaatgaaagaaaaaatggagctattctcatatgaaaggggatggaccaaatttgaataacatttgcttatttttagtagtatagtatccctaaaaatgtgcaaaataaatggaaaatggtgataattaatgggtaattaattagtattaatgggtgtggatcagttttctgctatagaatctactatccatataattatggatttgctgctataaatttataataatttcttaaatcttgtctagttataaaagttgtccctttattaataacattaattataaaagtttgataaagtaacccttatctatttcttaaatgagtaactaatgtttatattcgtttatttttttattagtgagggtggaattgaaaaaaaaattaacgcattcatgattttctaaagttattttgagcaaatctttttggcaagagtaacagattgtactgacattttgtttccaaatttaaactgagagaaaaacaaaatcaatagaagaagaaggaaaaggccgtgtggaccagacaaaaggagaaccctgaataattaataattttactgttgattaattggctaatacaaaatcgtaaggccannnnnnnnnnnnnnnnnnnnnnnnnnnnnnnnnnnnnnnnnnnnnnnnnnnnnnnnnnnnnnnnnnnnnnnnnnnnnnnnnnnnnnnnnnnnnnnnnnnnnnnnnnnnnnnnnnnnnnnnnnnnnnnnnnnnnnnnnnnnnnnnnnnnnnnnnnnnnnnnnnnnnnnnnnnnnnnnnnnnnnnnnnnnnnnnnnnnnnnnnnnnnnnnnnnnnnnnnnnnnnnnnnnnnnnnnnnnnnnnnnnnnnnnnnnnnnnnnnnnnnnnnnnnnnnnnnnnnnnnnnnnnnnnnnnnnnnnnnnnnnnnnnnnnnnnnnnnnnnnnnnnnnnnnnnnnnnnnnnnnnnnnnnnnnnnnnnnnnnnnnnnnnnnnnnnnnnnnnnnnnnnnnnnnnnnnnnnnnnnnnnnnnnnnnnnnnnnnnnnnnnnnnnnnnnnnnnnnnnnnnnnnnnnnnnnnnnnnnnnnnnnnnnnnnnnnnnnnnnnnnnnnnnnnnnnnnnnnnnnnnnnnnnnnnnnnnnnnnnnnnnnnnnnnnnnnnnnnnnnnnnnnnnnnnnnnnnnnnnnnnnnnnnnnnnnnnnnnnnnnnnnnnnnnnnnnnnnnnnnnnnnnnnnnnnnnnnnnnnnnnnnnnnnnnnnnnnnnnnnnnnnnnnnnnnnnnnnnnnnnnnnnnnnnnnnnnnnnnnnnnnnnnnnnnnnnnnnnnnnnnnnnnnnnnnnnnnnnnnnnnnnnnnnnnnnnnnnnnnnnnnnnnnnnnnnnnnnnnnnnnnnnnnnnnnnnnnnnnnnnnnnnnnnnnnnnnnnnnnnnnnnnnnnnnnnnnnnnnnnnnnnnnnnnnnnnnnnnnnnnnnnnnnnnnnnnnnnnnnnnnnnnnnnnnnnnnnnnnnnnnnnnnnnnnnnnnnnnnnnnnnnnnnnnnnnnnnnnnnnnnnnnnnnnnnnnnnnnnnnnnnnnnnnnnnnnnnnnnncacttggtcctatttttcattttggcactctatcttaaccttgttccattttggcccttcaactttatttcttatgtttcattttaacacaaaagctgaaactagtgcaaaacaatatagcgcgtgtgtatacacaaatctgaaatgtaataaatatccaattaaatgttgctcatccttgtcaaacgggtcaatactaaaatacccgacccgaatttcttggtttccatgatactttcagttcaacttgaaatccacaagaacaaatatccattccattatgagaaaataattttctttgagacatagattcacttcaaacttcaagcttatatgaaataaaggatgaaaaaaccatgtgtcaatatttaattggatatttattatacctcatatttgtgtatacacacgcgctatacttttttgcactggtttcagcttttgtgttaaaatgaaacataagaaataaagttgaagggtcaaaatggaacaagattggaatagagtgccaaaataaaaaacagagtcaagttgaatgggttgtatatgtatttggccaaatcgtaaagaacaaggtaagaaatatgattatacatagtaaacaccagaacaccctcttactatgtttcagatgctgtgctatcgaagacgccacgtagtccatattcatttacattgttaacaagaagtcaggaatgtcatgcgatataatattcaataagagctaactggtttacttaattaagggatagcactcttatatgctagtaattaataaaagttttcctgaaaaactttatggattataaagtttccttctttagtattttagtcttaagtactgttagttttatggaaaatgtagataaagataatcaagatttcattgatatgccatgcatatgcttatggtgacagattgtgatgatttcattgcctatggttattctcaagcaaccgtgttggcgtaatttcatcgctcctaattaatttcttagttgagaataatttggattattgtttttaagaaaaaggatcaagtttatgtaccatcttcgcctcttgttactggttaccctgttggatttctgccatcgagggagcttcagagaaaggaaatgtcgatattttcattcaactttaaaatcagactttttatagataaagatatttataactaatcaaccaactaattttgttataactatgctaaataactaatgcatacctctaatttctaatatttacaaactgagccctatactaactaagacttatatacaacacttcaacactccccctcaaggtagagggtgcaaaatgtttaacactcccagcttgcctaataagtagtgatgctatcccgagctcaatcctttggtcagtaaatctgcagttgatccttagtaggcactccaatgatccttgtttgaaattttcccgtataaaatgacaatcgatctcgatatgttaggttctctcatggagtatgggatttgctgcaatttgcattgcagctttgctgtcacaagagagggtaactggttttttttaatgtgatccctaactcatgaaacaacccagttagctaaaaaatctcagcaactgcagaagccatgcttctgtattctgcttctgcactgcttctagatattgtatgatgtttctttgatttccatggaaccaaagagttcccaaacttcactacatatccactcgctgacctcctagtaacaagacaggtagcccagtctgaatcataaaatcctagcagtgtgtttgtagattgccagtgtgcataagaactcccatgccaagtgttgccttcagatatccaaccactctaataactgcatccatgtgagatttctttggagcctgcatgaattgactaagattctgtactgcatagcttatatccggtcgagtgactgtcagatataaaagctttcctatgagcttttgatatcctgtaatgtcaaccataggatcatctccttccactccagctcctttatcatactccactaaagttaacttctgattgatctccaatggtgtgactgcatgctttcctccactcagtcctaactctgaaataaactccaaggtgtattttctttgattaagcaaaataccttgttgtgatctcaagacttttatacctaagaagtatctcagttcatcaagatccttgaccttgaactgctaatgtagaacttccttggcctcattaatcgtgatactattgcttccagtaattagcaggctatccatatatatgagaataataactttgtcactcccagatcttttattgaacaaggaataatcaaaagcactctaatgaaaacctgcattgactaattcttctgtgagctttaagttccactgccttgatgcttgcttaagtccatacaaggacttcaaaagcctgcatacctttttctcccctgcttttgaaagccttgtgacaagtccatgtacacttcttcatatagatctccctgaaaaaatgtattaaatacatctatttgataaagtttccaatctttggaggctgcaacagctatgacagatctcacagtcaccattttggcagctggagagaatgtctcatggtagtctaaaccttcatgttgattgtatccctttactacaagtcttgccttaaatcttttcacttctctatttgacttatatttgatcttgtatacccacgtagatccagtagtagacttcccagcacgtagagtcactatatcccaagttttgttatcctctagagccttcacctcttgctgcattgcctcaatctacctcttgttttttttactgcctgcttgaaggaatatggctctttcattactgaaaaacatgcaagtaatctctgtatttctgagttacagtgtcataagatagttagttagagatggagtaggcacactctatggatttctgcttctctgtaacataatcttgcatccatataggtggctattttgttcttgctgattgcatgatttctgcagttggaattccttcagatgctgaagttccttgcaaagttagaattgccaaatgatctgcattttctgcagtaggatctgcaacatgaactgttgtctcctcagctaaaactgcaggtgctgtagattccatgatctcctttagttgtttaaagccttttgtcaagcctccagcttctctttcagtggttgctgaatttccagatgtgacttttgcaggttattccaatggtgtagtcataactggcatttttgttgcttgaccatactcctttgggatttgtatttccacaacatgtgttgtccaactgtagacataggaaatcatcttagttctgcatcattgtgtgtggattaatctgcatttgagtctccttgaaagaaaaaccgatttcctgaaagtaacatatctactgacaaaaatataattagtttctaaatcaagaaatatatatcctttttgtgtagaggagtatcccaaaaagactgctttcttagttctaggtgcaaacttatcctccttcactaggttggtgatggtaggctataatctctattttagtcacttactacactctaattcactgcacttaacttgtgttgagatttaattagtaatttttttgtacttattgtgtgttttatgccttgtagagtgattccaagttatgtagatgttgtggagctaattcgagctatttggagctttaaagtctaagtagaagcccaagaaattaagtcgggatcacgttcgggggatcgaaaaccaagtatgggtgttacaaatttgaaaaaactcatttctcgccacaatttacactatcgccccgcggcatgcctcgtggggcgctagtgcaaaaagtggccagaaatcatattttgaatcgttttggaattttccacaatcgcgtcgcatagggcggcacaacatgcggcgtggtagctcaaaaatattagagtgacttccaattccgctaaaaaaaggtaatttcgtccggggtttattgggggatggaataaagacacgagaaaataccattttcgggacttttgacagattttcgacctaaggaggccaaggaagctaaggaggagttggaaaaacacaagcacaaggattttatcattccttccccactcaagatccgggtttggattgaatttatattttcctatattttagttatatttgtgaagaacttctccaaatctatggagtagtttcttttgggttttgatgaatttggtgtattgatgattgtttgtggattataactctatttttatgtatttgaatcattttataatatttaattgttgcatctatattcactaggtcatgtaatcgagagagacataacttgtgatatctttgaattatgccttctaggagtgatttcgagttatgtagatgttgtggagctaattctagctatttgaagttttgaagtctcagtaaaagcccaagctattaagccacgatcacgttcggggatcgaaaaccaaggctggatgccaaaaatttcaaaaaatcatttctggccataatttgcactaccgccccgcggcatgcctgcgaggtgctagtgcaaaaagtagccaggaatgatactttgaatcgttatggaattttccacaaccgcgtcgcatggggcggcgcggcacgcattgcggtagccaaaccgctaaaaagggtaatttcatctggggtttattgggggatgtcttatatacacgggaaaacatcattttttgggacttttgacacaatttcgacctaaggaggccaaggaggagttggaagaacacaagcacaaggatttaatcattccttcctcactcaaaatccgggtttggattgaatttatgttttcctatactttagttacatttgtgaagaacttctccatgtctatggagtatatcctattgggttttgatggatttgatgtattgatgattgtttgtggattataactctatttttatgtatttgaatcgtttttggaagatttaactattgcatctatattcacttgttcttgtaatcgaaagaggcataacttataatatctttgcattatattattggttgagttcatagattcttctaagtaatcgaaagaggctagttgaattattgattaaatctagttaggatattaatcgaaagaggttttcctaaagactgatctactacgtattcttgcgtatcttcacagtgctttaattggttcatctcgtgaggttaagacttaatcgagagagaagtagtttttgctgaatgtttgaattaataatagagtgaattcgagagactcacttgaacattggaaatgaattatctagagttagatcccgaacaattatcttgcacttattctgtcaaaaccctatcctcttccactgataaccttaattgcttattnnnnnnnnnnnnnnnnnnnnnnnnnnnnnnnnnnnnnnnnnnnnnnnnnnnnnnnnnnnnnnnnnnnnnnnnnnnnnnnnnnnnnnnnnnnnnnnnnnnnnnnnnnnnnnnnnnnnnnnnnnnnnnnnnnnnnnnnnnnnnnnnnnnnnnnnnnnnnnnnnnnnnnnnnnnnnnnnnnnnnnnnnnnnnnnnnnnnnnnnnnnnnnnnnnnnnnnnnnnnnnnnnnnnnnnnnnnnnnnnnnnnnnnnnnnnnnnnnnnnnnnnnnnnnnnnnnnnnnnnnnnnnnnnnnnnnnnnnnnnnnnnnnnnnnnnnnnnnnnnnnnnnnnnnnnnnnnnnnnnnnnnnnnnnnnnnnnnnnnnnnnnnnnnnnnnnnnnnnnnnnnnnnnnnnnnnnnnnnnnnnnnnnnnnnnnnnnnnnnnnnnnnnnnnnnnnnnnnnnnnnnnnnnnnnnnnnnnnnnnnnnnnnnnnnnnnnnnnnnnnnnnnnnnnnnnnnnnnnnnnnnnnnnnnnnnnnnnnnnnnnnnnnnnnnnnnnnnnnnnnnnnnnnnnnnnnnnnnnnnnnnnnnnnnnnnnnnnnnnnnnnnnnnnnnnnnnnnnnnnnnnnnnnnnnnnnnnnnnnnnnnnnnnnnnnnnnnnnnnnnnnnnnnnnnnnnnnnnnnnnnnnnnnnnnnnnnnnnnnnnnnnnnnnnnnnnnnnnnnnnnnnnnnnnnnnnnnnnnnnnnnnnnnnnnnnnnnnnnnnnnnnnnnnnnnnnnnnnnnnnnnnnnnnnnnnnnnnnnnnnnnnnnnnnnnnnnnnnnnnnnnnnnnnnnnnnnnnnnnnnnnnnnnnnnnnnnnnnnnnnnnnnnnnnnnnnnnnnnnnnnnnnnnnnnnnnnnnnnnnnnnnnnnnnnnnnnnnnnnnnnnnnnnnnnnnnnnnnnnnnnnnnnnnnnnnnnnnnnnnnnnnnnnnnnnnnnnnnnnnnnnnnnnnnnnnnnnnnnnnnnnnatttcgatagtcactagtcaatagctgtagatattaaattcttaattaaattttattattaatcatataaatctcaattgttgatcatcctggatagcaatcatgttagaaactatgagactactatttaaatccaatccctatggacacgatattatactatactatctttgactagcgagcacaatttaagtgtgtgttttgcgcttgtcaaagcaaaatagtagtcttgttcagtctaggaagtaatataggcatttctttgttgagccaaatatatgcttttacctaccaaattaatgtgtatcttagttagccccgttgaacctgtaatcatatttctttggcaaccacactataagcttgacccatttgtttgaattgtctatctgtttgaaccttttacctctcgtgagcacttgattttcttatgagattgtaaaagctaagtgaggtatggttgggttttgagtggaaatacagaaaaaggagaaaggtgcacaatttaaaaatttgtgagagccacatgcagagaattaaaaaaaagagaataattggaaaaaagaatttattccttgctagtggtggctctcaccttgtatgtgcttaaagatatggggagcttgaagctataggaatgaaggttggggtatggttcaacacaagtgcggggtttaaattgctaatgtatatgtattaaagtactcaggggggtgtagtcactatataaaaatatatcctaccatcccgcaacctacattacaaccagttaaagtcttatttgatccttgactgaatgagctcaattagttgagtattacattacgggcaagcttatggtacatcttttgtggcacatgaatattgtttctgagagtgagtgaattcttcctatcttgagttcctaactgttcttaaactttattgtgtgtggaactactctctattgttgtgtcatggcacttgattcatgaaggaaagctaatgtcattgacctctgtgttagagtaagtgagcaggttgtgaaaaatatgtggtgctgttgagtcacctcttgaggcgaggatgttacatattgtgcttaatatgtttgattattattgaagtgatgagttaggagagttgtttaaaaagggcgtgtctatgtgaagtatagtttgattgctcgaggacaagcaatagtttaagtgtggggtgttgatggtaggctataatcctgtattttagtcgcttattacactctaattcactgcactttacttgtgttgagctttaattggtaatgtttttgcacttgtgtattttatgccttgtaggagtgattctcagttatgtagatgtcgtggagctaattcgagctatttggagctatgaagtctgagtagaagcccaagcaactaaggcggatcatgtccgggggtcgaaaatcaagtctggatgtcaaaaatttgaaaaactcatttctggccacaatttgcactacctccccgcggcatgccccgcggcacgctagtgcaaaaaatggccaaaaatcatatcttgaatccttctggaattttccacaaccacgccgcatggggcgcgatagcccaaaaatgttagagtgacttcccaatttcgctaaaaagggtaatttcgtccgggttttattgggggatggcttaaatacacaggaaaacacatttttcgggacttttgacacaatttcaatctaaggaggccaatgaggctaaggaggctaagtaggagttggaagaacacaagtacaaggatttaatcattccttcctcacccaagatccgggtttggattgaatttatgttttcctatactttagttacatttgtgaagaacttctccatgtctatggagtagatccttttgggttttgatggatttggtgtattgatgattgtttgtggattataactctatttttatgtattgaataatttttggaaaatttaattattgcatctatattcacttgttcttgtaatcgaaagaggcataacctgtaatatcttagcattatattgttggttgagttcatagattcttctaagtaatcgaaagaggctagtagaattattaattaaatctagttaggagaataatcaaaagaggttttcctaaagactgatctactacgcattcatgcatatcttcacaatgctttaattggttcatctattcatgatgtaaacagttgtctgcacactctccccaaaacctttttggtagattttcttgaaactttagtgcccttgcagtatccaatatgtgctagtgatttctttctacaactccattttataatggagtgtaggcacaactactctgatgaatcactccttgatcctatagaagagtgttccattgattgttaaagaattcagttccattgtttgatcgaatcaccttaacagaggtatcaaattggttcttaaccatgcacaaaattgcttttaaaaaataatggtctcacccttcaattgcattagaaataaccaagttgctcgtgagtagtcatctacaacagtgagataatagtactttctatcatgacttggcactctatatggctcccaaacatccatatgtacaagttcaaaaggtttattgctcttttgttcactatcaggaaaggcaagcctagactgctttgccatagggcatacagaacatctattatgcaaactgctatctactttattcttcataaatggaatgaattgcaacactggtgttgatgcaacactagtgttgaagcatgtcctagccttatatgtcatatccagcttgactctcctcctctactttcatgcttaattgcagatactaattgtctcactcctcttcctttcagcaagtacaatccttcactttccttaccaatccccctcaccttgccattgtagaggtcctgaaatacaacctactcaggcaaaaaatagcagcacatgatatgtctcttgttaactttgatactgacatcaaattaaacttaaaatctggcacatgaaggacattctttaatatgccatcagttgataattgtgaattaccaatatgagcaatatcagtactagttccattagacaaccttactgaatcccttttatgcttattaatgcactgaatattgcttaacagattcaaagtagaagctatgtggtgtgtagcacctgaatcaacaatccactcatctggatgcatacttgatgaaagtgaacaaattgttgaacaagtagtacctgccatattagcctgtgtctgcacagatgtatcactaggtccttccttgttgaataggttcagaatttgttgatattgggcctcggtgaaaaactaatcacctcctttgctttatgaattcactactacaggtggcccttcaacattattggttgtcataggactcgctcttggttgatgccctctcttcgttttgaagtcgtctggatatccaatgattttgaagcaattttccttagagtgtcctttcattttgcaatgctcgcacagtagcaactacttccttcaacgataaccttggcctcttcctgcttgcatagccaaatgatcgatagcctgtttgtccaagcttctcaagaggcaaaaagtatttttttctcaaaagtaactttttccctaacttgacgtgtttggccaagcttttttgggggaaagaagtgcttttgggaagaagcagaagcagattttgtgaaacagaaaaaaatagcttcttcccaaaagcagaagcagaagtagttttgatttttcttcttaccaaaactattccttaacaaaatatagtatataccaaaataaccgttaaacctaatacttaggatattaatgtataaatatatcttatttttttggatagctttctaatatatagtgactttaggggtgaatgattttatatttgttgaataattttaaatatttttttaacttatattaaaagaattaagtacttttaaattttattttcatattttacttaaataaagggcaaaatacataagtgtaatgatccggatggtcgtttctagagttgtagccccgttcccccattttatgctccttttgtgttctacaactgatatatgacttaccgggttagttggttcgggtctggagagatttcagagtgaattgagacacttagtctcttaattgaaagcttaagttggaaaaactgatcagatgttgacttatgtgtaaacgacctcagatttgaattttgatggtttcgttagttttgttagatattttggactcaggagagcgtccagattgtgatttggaggtccgtagtagaattaagcttgaaatgacgaaagttgaaattttggaaagtttgaccgggagtggactttttgatatcggggtcggattggatttcgggaagttggagtaggttcgtggtgtcatttatgacttgtgtgcaaaatttgagttcaatcggacgtgattgataggtttcgatgttgtttgaggaatttgagaatttcaaagttcattaggcttgaatccatgtggaatttgtgtttttgatgttgtttgaggtaatttgatggtccgactaagtttgtattgggttataagacttgttggtatgtttggttgaggtcccggggggcctcgggttgaattcgggtgcttaacagacttggaagtaagttgcggaagcagtttaagctttgctactgctggtgtaatcgcacctacagagtgggaagcgcaggtgcgatccctgataagtgggaattttgactacttatttgcgccttttgacttttgttttagttcaaaaatgcttaaaggtattcccaaaaactgatgaaatatgcttacttacaggagtattggaaaatgagccaaggtgatgaaattcaactcaaaaggagtgattttgaacaaggacaaaaatcaggcaaaaaggctaaagtgcggaccgcagcattctgtctacggtcgtagaacaagaaacaaatttaacagtgctgcaatgcaaagtgctaaccgcacaataattgcgcggccgcagaagtcaaggttcagagatttgggacttcaagacaatcaagatctgcggaccgcactataattgtgcggccgcagaaatcaaatgtgcggccgcacccagaattgtacggtccgcagaactcaagttgttcagccgcacccagaattgtgcgatccgcagaactcaagaagtgcggccgcagttcataattgtgcggccgcagaaaccactcttgtaaagagctgcagcaaagtgctgaccgcacacagaattgtgcggccgcagaacctctgaaagggtaattttgtccgaaaattttagcagtgtataaatagtttttttggacaatattaggtcaagtttttaatattgaaagtattatagcaaattttccttacctctttaggtaagtttagcttatattggagatttaacattggattttcatcttttaatcttgcaatatgagttttatcatcttttattctttattttcttctttacccaatatgagtagctaaatttctagctagtgttgtgacccaaccctagtgtgtgaacctaatgggtatttgatttagggcatgtttatggttatgtgtttattatttagccttgccttgctattaattgtcgaattaatgtttgcaaatattagttcaagcctatttgacttggtctctacttgagaaagagagacttagtttaggaaatcttggctaacaagaatttagaatgaaatcaagagattgatagtcctaattatagggttgaacctagagatagtaaaacccgacttgagcattttatcaattgttttgtacgatacccatttggacttgagaaagccagattgggcaaaatcactctctcaccgagaggtattgagtgggtaattatgtgttgataactataatacaccccaaccaacaaaacacgctttaaagcttacaacccgttaggaaaatacctaggtgaaggtcataaccctaggtcttttacattatttgaaaacaacaacaaaaacaatattctctaggtttatattttagaattgaaaaccttagcgttatttgagaagtaaaaacaaaaccatatttgtggaagttcaatcaagatacttcacgtgtttattccaaatatataccactaatcccctctcagctctctgtggattcgatcccggctccttgttgggtattattattgcaatcgaccgtttcacaaccccgaatagaggtgtgacttggacgagatcaatttttggcgccgttgccggggagctaaatatggatttagctatatatttgtctttgtgtgtgaattgtcttcttttccttccgtgttactaatccttttggtaaaacaattatacgtgaaacaatggttctcaacaataatgatcctctcggaaacatgccgttgggggatgtggacgtggaagatgaccaagttgaagaggttcctcttgaacctcaagcaaatagacgaggccgaccgctcaagaccacgttcccgttccacccccaaatccacaaagagcagctccacaccaggtgttgccgaatgaagggtacgcaagtgccatagtcccaccccgcattagggcaggcaactttcaaatcacaaatgttatgctcacatggctagagcaacggggattcttcaccagggctccgaatcaaaatgcgtacaaatacttaaaaggatttgtggacacttgatgggggagtaaacagacatacgtctccgaggattctttaaggttgaggctatttcctttctcactatgggggaaagccttggattggttagaaaggttgccaaaccattccatccatacatgggatggattggcggagaaattaattgccaagttcttttctcccaggcatatggctactcttagagacgagattctagcattcaaacaagaacccaatgaacctttgcatgagatatgggagaggtaccgaactatggtgaaagagttcccgaacaatgacatgacggaggctatgattcaacaaacgttttatagggggatcaatactaccaatcaatgtgtggtcaacaaagttgccggtggaaatttcatgacaacaccatatgccgaagcttgtgaaatcttagatgaaatggaagatacttcatcggcattgcaaagtagagcaaatgttcctcaaggtgatccaaatgtgattcacctacataaagaattacatgatcatgggcaagcagttactaagttgaccattacaatgaatcaattagccaaagctcaacttcaacaagttcaaggtcctaagaaagtaaatgcaatggagggtgtcaatatgatagtaaacaagagaaggcaaaagggtcaacatgtgcaaagccgtgcagaacaatatgtgcaagaagataatgggtttgaccaagatgaatcttacaataaacaagaggaagaagtacaatatgtgaacaacttccaagggcaaagaaacaattctcaaggcccgaatcaacaacaatggctatctcaaggtaatcaaaagaaattgaaacaatcaaaacaaccaaggtaatttgaacaataaaaacaatcaaggaaattgaaatggtcaaaacaaccacagcaattggggtggcaatagtcaaggatattggggaggaaacaaccaagaaggacggaataataatcaagggaatctggggtcagaatttcaaaggcccccgatgtttcaacaaccaaacaacccgcctccttatccttcacatggtcctaactcttccaacaatgagatggggtgaattgataacatgtttaaataattgatcgagaagaatgccgactccgatgctcaactagcctctcaccacacttcaattcgcaatttggaagtccaattggggaaaatcttgcaagctttgaacactcgtcctaaaggggcactgccaagtgacatggtggggaaccaaagggtgggaacaacacgggacgtgccatggccgtgacagtggaaaaggtagggatgcaaccacctcaagtcaaagaaaaattatggatgatgaactagtgattcaagaagatgagattccaaacaatttggtgtaagccaatgatgaagtaagaattgatattaatgacattgtggaggatacttaagaggaagtgaacccatctagggatcacatagtagacataccgaaaccagtagtgccaaaggctaaggcaccaataccaaggtctcctcctccataccctcaaggcttgccaagaaaaatggagagaacaaattcaaaatgttcattcacatgatgacaagcctatctattaatgtgccattggttgaggctttgtagaaaatgctcggatatgcaaagttcatgaaggatttggtgacaaagaagaggtcgatgaattgtgagactataaagatgacacatcaagtgagcgcaattnnnnnnnnnnnnnnnnnnnnnnnnnnnnnnnnnnnnnnnnnnnnnnnnnnnnnnnnnnnnnnnnnnnnnnnnnnnnnnnnnnnnnnnnnnnnnnnnnnnnnnnnnnnnnnnnnnnnnnnnnnnnnnnnnnnnnnnnnnnnnnnnnnnnnnnnnnnnnnnnnnnnnnnnnnnnnnnnnnnnnnnnnnnnnnnnnnnnnnnnnnnnnnnnnnnnnnnnnnnnnnnnnnnnnnnnnnnnnnnnnnnnnnnnnnnnnnnnnnnnnnnnnnnnnnnnnnnnnnnnnnnnnnnnnnnnnnnnnnnnnnnnnnnnnnnnnnnnnnnnnnnnnnnnnnnnnnnnnnnnnnnnnnnnnnnnnnnnnnnnnnnnnnnnnnnnnnnnnnnnnnnnnnnnnnnnnnnnnnnnnnnnnnnnnnnnnnnnnnnnnnnnnnnnnnnnnnnnnnnnnnnnnnnnnnnnnnnnnnnnnnnnnnnnnnnnnnnnnnnnnnnnnnnnnnnnnnnnnnnnnnnnnnnnnnnnnnnnnnnnnnnnnnnnnnnnnnnnnnnnnnnnnnnnnnnnnnnnnnnnnnnnnnnnnnnnnnnnnnnnnnnnnnnnnnnnnnnnnnnnnnnnnnnnnnnnnnnnnnnnnnnnnnnnnnnnnnnnnnnnnnnnnnnnnnnnnnnnnnnnnnnnnnnnnnnnnnnnnnnnnnnnnnnnnnnnnnnnnnnnnnnnnnnnnnnnnnnnnnnnnnnnnnnnnnnnnnnnnnnnnnnnnnnnnnnnnnnnnnnnnnnnnnnnnnnnnnnnnnnnnnnnnnnnnnnnnnnnnnnnnnnnnnnnnnnnnnnnnnnnnnnnnnnnnnnnnnnnnnnnnnnnnnnnnnnnnnnnnnnnnnnnnnnnnnnnnnnnnnnnnnnnnnnnnnnnnnnnnnnnnnnnnnnnnnnnnnnnnnnnnnnnnnnnnnnnnnnnnnnnnnnnnnnnnnnnnnnnnnnnnnnnnnnnnnnnnnnnnnnnnnnnnnnnnnnnnnnnnnnnnnnnnnnnnnnnnnnnnnnnnnnnnntgaagatcctagctctttcacaatcccttgcactattggaagtgcctactttgccaaaactctttgtgatataggggcgagtaccaacttgatgccctactcgattttcaaaacattggggattgggaaaccaagactcacttctatgaggctacaaatggtggatcgtactatgaaaagacaattgggtattattgatgatgtgttggttcgtgttgataagttcattctcccggcggactttgtgatttttgattgtgaagtagactatgaggtgcctgttattttgggtagacctttccttgctatggggaaggcatttgttgatgtggaagctggcgatctcactttccgggtgggtgatgaaaaggtggttttccatgtgtgcaaatctatgaggcaaccaaatataaatgtagtttgttcatttgtggacctagtgaccgaggtgattgttgatgattctagtgccatgatgaatgttgacgatactttggaggccgtattgcttaatcatcatgatgatgaaaaggttggatatgtggaatgtgtgtatgcattgtaaggaatgaggtcgtacacttatgaaccccgcaaagtgtccttagatcttgaaaatcagaagactcctccagcaaagccttcaatcgaggagcctcccactttggagttaaagccattgccttcacatatcaggtatgaattccttggcccgtgttctgctttaccggttattctttcctcttgtttgactaacgtgcaggtagactctactttggcggtgctacaaaagaggaagaaagctatcagatggacattggtgaattttcggggtataagcccaccgttttgcatgcataatattattttggattgggattccaaacactccactggacatcaaagaagactaaatgaagcaatataagaggtgttgaagaaggagatcataaagtggttggatgccggggttgtttaccccattttcgaaagctcgtggacctctccagtgcaatgtgtcccaaagaaagggggcttgactgtggtcaccaatgacaaaagcgagttgattcctacaagaatggtgactgggtggagagtgtgtatgaactatcgcaatctcaacaaagtcaccaggaaaaatcattttccacttcccttccttgatcaaatgcttgatcggttggctggccgtagtttctattatttccttgatggatattccagctataatcaaattcttattgttccggaggaccaagataaaactactttcacatgtccctatggtactttcgcattctcgcggatgccatttgggttatgcaattcaccaacgacgtttcaatggtttatgatggctatcttcaccgacatggttgaggattttcttgaggtcttcatggatgatttttctatggttgcgaattcttttgatgactgcttgaaaaacatggataaggtcttggcaagatgcggggagacaaacttgatgctcaattgggagaagtgtcacttgatggtctaggaaggcattgtccttggccaaaaactttcaaagaatggtattaaggtcgacaaggccaaaatagaggtgatttctaaactcccaccccctacatccgtgaagggagtacagagcttcttgggtcatgcgggggttccatcgccgtttcatcaaggattttccaaagtggtgaaccccttgtataagtttttggagaaggatgccaaattccatttcaacaaggattgcatgaaggcattcgaattgatcaagttcaaattgactactactcctattatcaccacaccggattggagcttgaattttgagctcatgtgtgatgcaagtgatgtgacggtcgggacagttttggggcaacgtattagcaaaatattccattcggtctactatgttagtaagaccatgaatgatgcccaagtcaattacacaatgaccgaaaaagagctacttgctattgtttttgatatggagaagtttcgcccgtacttgatgggtacaaaagtgattgtccacaccgattatgcggtgcttcggaaaaagtattcaaaggtgaggttaacgcggtgggtgcttttattgcaagagtttgatctagaaatccaagacggcaaaggcagtgagaaccaagtagcggaccacttgtctcaattggaggaggaggggaggccacatgacggccttgaaatcaatgactccttccctgacaagcaacttctagtcatttcaatgaccaagataccatggttcaccgacttagaaaattatcgtgtgagttgtattgtaccaaatgagttctcttcaaacctaaggaagaaactcaaacgggattgccttgactactattgggatggaccgtacctcttccgaatttgtaccgatgtgattcgaagatgtgtgctggaggtggaacaagtggaaattcttggtgcttgccactcttcaccatatagtggtcaccatggggggagggggagggggcgagaacggcgacaaaagtgttgagttgtggattctattggcctactctctataaggacgctagtgatctagtcaagcgttgtgatgaatgtcaaagggccggtnnnnnnnnnnnnnnnnnnnnnnnnnnnnnnnnnnnnnnnnnnnnnnnnnnnnnnnnnnnnnnnnnnnnnnnnnnnnnnnnnnnnnnnnnnnnnnnnnnnnnnnnnnnnnnnnnnnnnnnnnnnnnnnnnnnnnnnnnnnnnnnnnnnnnnnnnnnnnnnnnnnnnnnnnnnnnnnnnnnnnnnnnnnnnnnnnnnnnnnnnnnnnnnnnnnnnnnnnnnnnnnnnnnnnnnnnnnnnnnnnnnnnnnnnnnnnnnnnnnnnnnnnnnnnnnnnnnnnnnnnnnnnnnnnnnnnnnnnnnnnnnnnnnnnnnnnnnnnnnnnnnnnnnnnnnnnnnnnnnnnnnnnnnnnnnnnnnnnnnnnnnnnnnnnnnnnnnnnnnnnnnnnnnnnnnnnnnnnnnnnnnnnnnnnnnnnnnnnnnnnnnnnnnnnnnnnnnnnnnnnnnnnnnnnnnnnnnnnnnnnnnnnnnnnnnnnnnnnnnnnnnnnnnnnnnnnnnnnnnnnnnnnnnnnnnnnnnnnnnnnnnnnnnnnnnnnnnnnnnnnnnnnnnnnnnnnnnnnnnnnnnnnnnnnnnnnnnnnnnnnnnnnnnnnnnnnnnnnnnnnnnnnnnnnnnnnnnnnnnnnnnnnnnnnnnnnnnnnnnnnnnnnnnnnnnnnnnnnnnnnnnnnnnnnnnnnnnnnnnnnnnnnnnnnnnnnnnnnnnnnnnnnnnnnnnnnnnnnnnnnnnnnnnnnnnnnnnnnnnnnnnnnnnnnnnnnnnnnnnnnnnnnnnnnnnnnnnnnnnnnnnnnnnnnnnnnnnnnnnnnnnnnnnnnnnnnnnnnnnnnnnnnnnnnnnnnnnnnnnnnnnnnnnnnnnnnnnnnnnnnnnnnnnnnnnnnnnnnnnnnnnnnnnnnnnnnnnnnnnnnnnnnnnnnnnnnnnnnnnnnnnnnnnnnnnnnnnnnnnnnnnnnnnnnnnnnnnnnnnnnnnnnnnnnnnnnnnnnnnnnnnnnnnnnnnnnnnnnnnnnnnnnnnnnnnnnnnnnnnnnnnnnnnnnnnnnnnnnnnnnnnnnnnnnnnnnnnnnnnnnnnnnnnnnnnnnnnnnaggatttctaagaaaaatgagatgccacttaccaccatcttggaaattgacatttttgatgtgtgaggcattgatttcatgggaccgttcgtaagctcttatgggaacacctatatttttttagctgtggactgtgtgtcaaagtgggttgaacccgtggctctacccaacaatgaagctcgaagtgtggtggcatttttgaaaaagaacatctttacaagatttggtactccaatggtcattataagtgatggggaatcacacttttgcaacaaatcttttgataccttactcaccaagtagctcacaaagtcacgaccccctatcatcctcaagcaagcgaaaaagtggaagtctccaaccaggagatcaagagtattttgtcaaagatagtgaatgccaaacagactaattggttgaagaaacttgatgatgctctatggggctataggacggcttataaaacaccgattgggatgtcttcataccggttggtgtttgaaaagcttgtcaccttctggtggaacttgagcacaaagctatgtgggcattgaagaagctaaatcttgagtgggatgtcgctgctaacctgagggtggcacaattgaatgagcttgatgaattctggtaccatgcatatacaagttcttctttatgcaaagagaagatgaagtacctccatgacaaatacattcaaaacaaggagttcaaagaaggtgatcttgtgttattgttcaattctcggttacagatgtttccgggaaagttgaagtctaagtgtagtggtccgtttgaggttgtgaaggtgacaccctttggtgcattaaacttgaagaataaaaatgatgaagtgtttagagtcaatggtcacccggtgaagcattatcttggaaaagttgatgatggccacgtcgtggcattaattaatttcaagtgattgatggtaatctacgtcttgccgcggcattaaatcaggcgctttttgggaggtaactcgtgtttctttttattcttcttttccttatttttagaaaggttttgttttgtgctaactggttttgaagtgaattgcaggaatgattgtgctttgcaggaactgtgctcgaaaaaataaaaataaaaaatggctaagtgctgaaaaagtgcggactgcacatttattgtgcggaccgcacaatcttgcatgctacagcagaaaggagtctgcggccgcacaactggagacccaaaaatgcaactcactgaagtttgaaattgcagagaattggccaatgtgcgaccgctcttgatattatgcggtccacacaaatagttccggccgcatccaattttttgcggacctcagatcttcagcgggaccaggtaaagagtgcggaccgcacacaaaattgtgcggaccgcacacaaaattgtgcggccgcactcagctgcacaaaatgacctaagttggtcaacatataaataggcccccctctcattgttccaaatatacgcacttagaactcttaacaccaaagtaagcatagtgcaaaagaattgtttcaaacatcacactcatttcaacattctagattttcccctgcatctttcatcactggtatgttcaattcgtgtttagatttttccaaattttcttagtttttatccttaattagtatagttatctttaggcctaaatgtcagatgattcatcatatgtgcttaaaattatatgggtaatttcatatgtactcattgggggttgggtaaatcatgtatcatgtctaatttgccaataccatgtctaacttgtgtaaaaaataaaaataataataaaatgaataacctaagttcagtgccatttaattttgaattgtgcggttgcacatgaaattgtacggtacgcagatccttagttttagggcaagtctatgcattcaatgtgcggaccgcacccaaaattgtgcggtatgtagaaaatgatctgcggccgcagaaacatttgagtgaccatagacccaaactttagagaactggtattactaggcctggaattgtgcagccacactcataattgtgcggtccacacttcaattatgcggccgcacttcaaaatagtgcggtccgcacaagccattctgcggacgcactcaaaattgtgcggactgcacttccccctctttcccactaatttataatctatgtttaaactttaactgactcatgttgctatgtattgtagaaaatggttagatcaagaggacgtggtgatacttccaaagggaggggtgaaccctcccgaggccgaggcaggggtaacctaccactctccgtgcaaaaagtgattagtaagaaggcaacaataggccgaggtagaccgccggatccctaaaaatcaagttcatatgccccgtccaaggaagcatcagagggagactcagtgcaaaggcagcctgctgtgccatcacagccacaactgccccaggacagattccggctgagagatgagcctacctcttctaagagtacttctaagggatcgaaagggaacagtcaggctacgtagccctcatctactcatgccccctccgcaccagtcacatttgatgtaatgatgatatttcggatgatgatcgggggagaggggggtgataccagagttacaggtctggagaggtcaaagaagaaggaagtttgggaagataggtttgtgagcctgactacattcaacagattctgtgagtggtggccgcagagatcgctcactcttgagtggcagtttgtgttgaatgatctggatagatacaacccgaatgagttaagacaattttaggaaagaaaagggtggaaatggttcaccaaaagcgtattggatgccaaggagcacttagtccgggagttctacgccaatgtgacacacattaaaaaaggggactaaggtgactaaggtgcgaaacttaaaagtacgatttgatcagaccaccctgaacatttatttggtgctcgaggatatggagccgatgcagtatttagagaagttcgcactgggtgatgcagctcgcccttggctagctgagatactagcagctccaggaccaccaccaccaccatggatcacagcaggggttcctattctgcggaacaccctcaactttgaatcaaaagggtggaaaacattcgtatgcagtcgcatagaaccaagaaggaatgaaaacaatcttccaatcccccagtcaatcttagttgcatctatcatggatgggtatccaattaatgtgggtgccatcatgtgggccaatatgtctctggttgtcaggcagggtgaaagctcctatccatatgccaacactatcatggagtatctcacagatgcaggggtggaacccaagagctttgatatgaaggtaagggctaagcaacccttctcctggtactatctgaatgacacaagtaacccgaaaaataagggtaagtcgactactaccgtaggccagtctgatgagccatctgtggtagttgcagattctgccgctatgccttctacaacttccatgccttctacagtacccgggccttccaccgagacagcagtcatgccaccacctccatcttcagggccatcagcgctagtattagtgccttcttcctcaaattatccgctctctgcattgcgagtctcccaaacactggcgagtctcaacaattggatacagacagctactgcaaagctgtctgacctatccagtgctattgcagctcagacccctacctcagcaccacagattcctccgtcaatggaggaaactttgaagaaaatattggagaatcaaaagaccatcatggtcaccttggtggaacatgggggagaaattgaggaacttgggaagcaggtgaaaaagttgaggaaatcccaggcttcaaggaaatcagttgacaggttgagacgagaggtgaccaagatagcaactgatgaagatcttccatttgagttactgatagagacagatccatcagtaccagcaaacccagcggcaccattggcaccagctggccagtctgaggagccagacctcgctgcccacactgctgtagcggtgctacagatgttcgccaatccagttgctccccaagaagaggatgatgagatccagttggaggagcctgcgggaggtgatgctgctatggacactgagaccacatagggagtcctctcaactctttcccttccttgtttttattttggtaagaattggtgacaatgcttatttttattcagggggtggagtatattttgatttaacatttgacattgacctgtaataactgataacattctttttttatttttactttcattatgtacatacttgtctctctctattgatgtatatattctctttccctttctcagtttgtatattcatttattatgctttcagtagtttacttcataacttctttattttgttttcttagtnnnnnnnnnnnnnnnnnnnnnnnnnnnnnnnnnnnnnnnnnnnnnnnnnnnnnnnnnnnnnnnnnnnnnnnnnnnnnnnnnnnnnnnnnnnnnnnnnnnnnnnnnnnnnnnnnnnnnnnnnnnnnnnnnnnnnnnnnnnnnnnnnnnnnnnnnnnnnnnnnnnnnnnnnnnnnnnnnnnnnnnnnnnnnnnnnnnnnnnnnnnnnnnnnnnnnnnnnnnnnnnnnnnnnnnnnnnnnnnnnnnnnnnnnnnnnnnnnnnnnnnnnnnnnnnnnnnnnnnnnnnnnnnnnnnnnnnnnnnnnnnnnnnnnnnnnnnnnnnnnnnnnnnnnnnnnnnnnnnnnnnnnnnnnnnnnnnnnnnnnnnnnnnnnnnnnnnnnnnnnnnnnnnnnnnnnnnnnnnnnnnnnnnnnnnnnnnnnnnnnnnnnnnnnnnnnnnnnnnnnnnnnnnnnnnnnnnnnnnnnnnnnnnnnnnnnnnnnnnnnnnnnnnnnnnnnnnnnnnnnnnnnnnnnnnnnnnnnnnnnnnnnnnnnnnnnnnnnnnnnnnnnnnnnnnnnnnnnnnnnnnnnnnnnnnnnnnnnnnnnnnnnnnnnnnnnnnnnnnnnnnnnnnnnnnnnnnnnnnnnnnnnnnnnnnnnnnnnnnnnnnnnnnnnnnnnnnnnnnnnnnnnnnnnnnnnnnnnnnnnnnnnnnnnnnnnnnnnnnnnnnnnnnnnnnnnnnnnnnnnnnnnnnnnnnnnnnnnnnnnnnnnnnnnnnnnnnnnnnnnnnnnnnnnnnnnnnnnnnnnnnnnnnnnnnnnnnnnnnnnnnnnnnnnnnnnnnnnnnnnnnnnnnnnnnnnnnnnnnnnnnnnnnnnnnnnnnnnnnnnnnnnnnnnnnnnnnnnnnnnnnnnnnnnnnnnnnnnnnnnnnnnnnnnnnnnnnnnnnnnnnnnnnnnnnnnnnnnnnnnnnnnnnnnnnnnnnnnnnnnnnnnnnnnnnnnnnnnnnnnnnnnnnnnnnnnnnnnnnnnnnnnnnnnnnnnnnnnnnnnnnnnnnnnnnnnnnnnnnnnnnnnnnnnnnnnnnnnnnnnnnnnnnnnnnnnnnnnnnnnnnnnnnnnnnnnnnnnnnnnnnnnnnnnnnnnnnnnnnnnnnnnnnnnnnnnnnnnnnnnnnnnnnnnnnnnnnnnnnnnnnnnnnnnnnnnnnnnnnnaatagcttcttatttactttattagcttctttttaatttagtagtttctttcatgtttaagtgatcattaagcctttgattttcttaatgtcacggttctttccaaaggtgggttttttgtgaaccggatgactcttcccacaagaaggtcacggtagaggaagaggtgcaactcgcacaacacttagggcagcacctgtagatgcaccagttgccccagttcaagagcaggttccagttgtggataagcctgtgagaccagctcatgcaccacctgtgcccattgtgattccaggccttcaggaggtcttagctcagattctgatagtttgcaccggccttgctctggtggttttggctcaggccgcacctgtcacttctcaggttgagggaggtactcatacccctgttgcccatacaccagatcagatagcgcagagacttcagataacgggggcactacctgctcaaccggttgctgctgctcaggcccatatagttcttgttatgtctgatgatgagcagtggagattggagaggtttgggagactccaacctctttctttcggcagtacaaaggcggaggatgcccagggtttcttggacaagtatcagaggattctccgtacaataggtattctggagaccaatggggtctcgttcactactttttagttatctggggctgccttcagttggtgggaggcttatgagaggcgtaggctggttggctcaacacccttacatggcaggagttctccattctcttcctagagaagttcgtgcctcattcccgtagaacagagctgcgcagacagttcaagcagcttcgtcagggtgatatgtctgtgaagcagtacgagatgaggttttttgagttggccaatcatatagtatagttggttcccatagatagggagagaatcaggaggttcattgatggtctcacatttcagctgcggttgcttatgactagagagagagagtgtctggtgctacttttgatgaggttgtcgacattgcccgttagataaaaatggtctgcaattagaagcgggttgagagggaggccaagattcctcattgacagggtggactcgggggtgttccttcacggggtcagttctgccacgacaggggtcgtccttacaggcatgctgaaatggcccacccaattcactgaggtgtgtcatctggccatggttcacacagttatcaatagggtcattcatctctcagtgcccttccagcttagagttcgtctcgtgctccatcgggtcggggctcgtctatgccaggtccatctaccagttatcccggtgctcggggctccctccagtccccaccaccaacactggggggttgctatgagtgtggagagtttggccatatcatgagatattgtccccgccttacgggaggtccggctcagcagaggagtcagactatgacttcatcaccagttacttcaccacccgctcagccagctctgggtggtgcccagtcagctagaggtcgcccaagaggtggcggtcaggcccgattctatgctcttccttccagaccagatgccattgcttctgatgcagtgattactagtattgtctcattctgccacatggatgcctttgtatttttgaccctggttccacttattcatgcgtgtcatcatatttttcccattatccggatatgctccgtgagtctctagtttcatctgttcatatggacagggtataccgatcgtgtgtactgactattgggggattggagaccagacttgacctcttgttacttagtatggatgattttaatgtgattttaggtatggagtggttgtctctatgtcatgctattctggattgtcacgctaagactgtgacattggcgatgtcggggatgccacagatggagtggcgaggttttctagactatgttcccagtagagtgatttcatacttgaaggctcaacggatggctgggaagggttgtttatcttatttggcctttgtgagggatgttagtgctgatgctcccactattgattctgttccagtggtgcgggagattctgaatgtgtttcctgcagacccgccgggcatgccgcccgacagggatattgattttggtattgacttggtgccgggcactcaacccatttctattcctccatatcgtatggcaccggctgagttgaatgagcatcttcaggaactccttgataaggggtttattaggccaagtgtgtaaccttggggtgcacctgttctgtttatgaagaagaaggatggtactatgagaatgtgcattgattataggcatttgaacaaggtcacaatcaagaacaagtatcctttgccacacattaatgacctatttgaccaacttcatggagcgagggggttatccaagattgatttgaggtctgggtatcaccagttgaagattcgggactcggatattcttaatacaactttcatgaccctttatggtcattatgagttctttgtcatgtcttttgggctgatcaatggcccagcatcgttcatgcatctgatgaacagtgtatttcagccttatctcgactcgtttgttattgtgttcattgacaatatcctggtgtacactcgtagtcagaaggagcatacccaacatttgagggttgtgttgcagcagttgagggaggagaagctttatgccaagttctccaagtgtgagttttggctcagctcagtggcattcttggggcacatggtgtccagtgagggtatttggtagatccgacgaagatagaggcggtttagagttgtcccagaccatcctcagctacggagattcggagctttcttggcttggccggttattatcatcgatttatggagggtttcttgtctattacatcgcccttgaccaaattgacccaaaagggtgctcctttccggcggtcggatgagtgtgaggagagctttcagaagctcaagactgccttgaccacaactccagttctagttttgctgtcagctttgggatcttatacactatattgtgatgctttttggattggcattgggtgtgtattgatacagaagggtatagtgattgcttatgcttcgcactagttgaagccccatgagaagaactaccttgttcatgatttagagttggctgccattgttcatgcgctgaagatttggaggcactatctttatggtgtgtcttgtgaggtatttatagatcatcggagcctccagcacttgttcaaacaaaaggatctcaatttgaggtagcggggatggttggagctactaaaggactatgacatcattattctgtatcatttagggaaggccaatgtggtggccgatgccttaagtaggatggcggtgagtatgggtagtctagcttttttccccgttagagagagacctcttgtagttgatgttcaggctttggccaaccggttcgtgagattagagattgtggagcccaatcgggtcctcgcttgtgatttctcgatcttctatatttgatcgcatcagagagcgcaaatatgatggtcctcatttgcctgtcctcaaggatagggttcagcacggtgatgccagagatgtgactattggggatgtggggtaatgaggatgcagggtcagatttgtgtgcccaatgtggatgggctatgagagttgattcttggggaggcccacaatttgcagtattccattcatctgggtaccacgaagatgtacgatgacttgaggcagcacaattggtagaggaggatgaagaaggacatagtggggtttatagatcgcttccttaactgtcagcaggtaaaatatgtgcatcagagaccaggtggcttgcttcagaggttagatattccagagtggaagtgggagcggatcaccatggattttgtagttgggctccaacagacttcgaggaagtttgatgctatttgggtgattgtggattgtctgacaaagtccacgcacttaattctagttggtacaacttattcttcaaagcggttggcagagatttacattcgagagattgtgcgccttcacggtgtgccagtttccataatttcagatagagacacgcagtttataatgtaattttagagagccgtgcaacgagagttgggtactcaggtggagttgagtatagcatttcacccttagacggacgggcattctgagcacactatttagatattggaggatatgctacgtgcatgtgtcattgatttttggggttcatgggaccagattttgccactcgcggagtttgcctacaacaatagttatcagtcgagcatccaaatggccccgtatgaggctttgtatgggaggcagtgtagatctctggtggtttgggttgagcccggtgaggctaggcttttgggtacagacttagtttagaatgcattggacaaggtcaaattgattaaggagcggcttcgcatgacgcagtctagacagaagagctatgccgacaggaaggtcagtgatgtgtcttacatggttggggagaaggttctactgaaggtttcacccatgaagggtgttatgcggttcgggaagaagggtaagttgagcccttggttcattgggccatttgaggtacttcagaggattagggaggtggcttacaagcttgccttgccacctagattgtcgagtgtgcatccagtatttcatgtttatctgctccggaagtatgttggtgacccatctcatgttttggattttagcacggttcagttggatggtgatttgacttatgatgtggagccggtggctattctgggttgacaggttcggaacttgaggtcaaaggatataacttcagtaaaggtgcaatggagaggtcaaccagttgaggaggctacgtgaaagaccgagcgggagatgcagagcagatatccacacctatttgagactctaggtatgtttctagactcgttcgaggacaaacatttgtttaagagggataggatgtaacgacccggacggtcatttcgagagttctagcctcgttcccccattttccactccttttgtgttctacagttgttatatgacttaccgagttagttggttcgggtccagagagatttcagagtgaattgagacacttagtctcttaattgaaagcttaagttggaaaggttaactagatgtcgccttatcattaaaggacctcgtatttgaattttgatggttccgttagcatcgttagatgattttggactcagaagcgcgcccagattgtgatttggaggtcctagtagaattaggcttgaaatggcgaaagttggaattttagaaagtttgaccgggagtggaatttttgatatcggggtcagattgaattttcggaagttgtaataggttcgtggtgtcatttatgacttgtgtacaaaatttgagttcaaccgagcatgatttgataggttttgacgttgtttgtggaatatgagaatttcaaagtttattaggcttgaatctgtgtggcattcgtgtttttgatgttgtttgaggtaatttgagggtcagactaagttcgtattgggttataagacttgttggtatgtttggttgaggtcccgtggggcctcgggttgaattcgagtggataacggacttggaagtaagttgagaaagcagctgaagctttgctactactggtgtaatcgcacctgcggagtgggaaccacatgtgcgatcttgcagaagcggggagggagccgcaaaagcggccaggaaggacttggacaggggccgcaagtgcggacttgtgggcgcagaagcgcttgcgccgaagtaggaggacgggcgcaggtgcgggcaggcgcacatgtgcaatggaattttccgcacctgcgaaggcacagatgccgtccaaggctcatagaagcaaaggcagctgggctaagtaacttccacagtgtagagtttttaccgcagaagcgggaccacaaatgccgaaatatggccgtagatgcgaaagggtctaggcagaatgttttaaaaaatgaaagtttcgcgattttggcttcatttcaacattttgagctcagattttggagattttgagagggcttttcaagggaatttttgaggtaagatccttgtgtccatttttcttcaatgattatgtttccccactaattttacacctagttggtgagtttttgaggtgaaatttgggggattgcggctagggatttggagagataattttggggaattgaatggccatttgatgtcggattttgataagtttggtatgattagactcgtgattcaatgggctttcgggttttgtgactcttgtcgaatttcgagatgtgggtccacaggccgggtttgagccaatttcagatctttggcttataattcatatttttcttatggaattaatccctttagccatattgattgtattatattgcttatggctagattcaggacgtttggagctgattcgtgaggcaagggcattttagagtagagttttggctaaaattgaggtaagtaacaattttaaatctggtcctgagggttgaaaccccggattttgttgttatatgattattttagaggtgagacacatgctaggtgacgggcgtgtgggcgtgcaccgtaagaatcgtgacttagtccattctgtggaactataaagttgaataacttgttgttagctatatgctctccctgtattatatatatttgactgcaaatcatgttaggagtcatgcttaggctatgtgattacactgttgggacccgtagaggtcgtgtacttgctgaattatttgctaatttttgttttgtactcagtcatggtttacttgcgtatcatatctcagtctcttcttgtttcttgtagatatatgatattatctttgtttgggctaatttttatgacttctgagagcccgagagactagagaggttgatgactgagttagggcatgagtgccgaactgtgcgatatatgtacatatatggatcgggttgcacaccgcaacgggcctgagggctgtatgtttatggatcgggttgcaggcagcaacgagccttagggctgcatatatatatatatatatatatatatatatggatcggattgcacgtcgcaacgtgccttatggctatttatataggatcaagatgcacgccgcaacgatatagctcttgggctgaaggagcccctccgaagtctgtacacccccagtaagcgcaggtacttattaagtgtgagtattcagggctgagagtcgggtgataagctattgagctgagtgactgttgccctgagaggcggtacttgttttcattgttgtttcacatagcttctatatgtcattgttttgaaacttttaagagatactatatccagattttacttgaactcggcatgtaaaaattgatttgacttaaattgtcggatttggaatcatgtctactttctttttaagatcactgaaaatgaagtataacagcatagctcgtcactatctttcagttccttatttattattgttacttactgagttggttgtactcacgctacaccctgcacttcgtgtgcagatccaggtgttcccggtcataatgggtgttgatatttgagcagctgatcccggagactatcgaggtaactgcatggcgttagcaggccttgggtctccttcattatctttatcgtatttcatttcttattccttatacattgtattagagtgttcctggaatagtttctcatgtactcgatgtgtcacgacacaaaatccactagtcgtgatggcacctaactcaacccgctaggtaagccaactaataactatccaatttcaattaactttttaataagacacttaaacaaaggaattatcttaatcttatacatttcccaaggactggtagtacaaattatgagcttctaagaacagagtttacaaagctgatatgaactaaatacactttctatttgaaaagtatataaacagagttttaaaatcaaaggctaccatgaacaagagacaactacaacagggacgcaagtaaatcttccaatctagctcccatcgaacacaacaacatcggcatccgaaatctgcacgcaatgtgtaggaagtgtagtatgagtacaatcggccccatgcactcaataagtagcaaacctaaccttaggttcaagtgagttgactttggtcaacgtttttagtaaaaagacccggatcagtgttttgatagttctggtaactccgtatcgtgatatgggacttgggcgtatgcccggaatttaatttggaggtccctagctcaagttatgaccatttaacgaaaccagcaatttaaaggctaaatataccaagtttgaccacggggttggctttttgatatcagagccgaaatccgattctgaaaatttgaacagctctgttatgtcatttatggcttgtgtgtcaaatttgaagtcattccggattcatttaatattttttggcacaaggtttgcaaattgaaaagtttaaaactcaaagtctgaatcgaggtgtgaattgcaatttcgatgttatttgatgtgatttgagacctcgagtaagtctgtattatgttacgggacttgttgggatatttggataaggtttcaaggggctcgggtgagtttcgaacgaaattcggattgtttagagcatgttgaaagcagcaggttcttggcagaacctggtgtaatcgcacctgtgcaatggtggtcgcaggtgcgcaactgcatctgcgagaagctggttgcttctgcgacctgggcactggccagttgcatcgcttctgcgtagaaatggggtgcaaatgcgcgaccgcttctgcgaaggatgaatcgcttctgcggaagagaccgcttctgcggtcgtttggtcgcttctgcgacgttgcaggtgcgatagaaatgtccgcggatgcggaacctcgcctggaagccctacttcgcaaatgcgagatttatctcgcaaatgcgtgaccgcaggtgcgaaaatatagcccgcaaatgcgaaaatacggggcagaatacataaaatcgggtcttagccatttttactcttttttgagttttaagtctcggatttgggcgatttcaagggggatttttacgnnnnnnnnnnnnnnnnnnnnnnnnnnnnnnnnnnnnnnnnnnnnnnnnnnnnnnnnnnnnnnnnnnnnnnnnnnnnnnnnnnnnnnnnnnnnnnnnnnnnnnnnnnnnnnnnnnnnnnnnnnnnnnnnnnnnnnnnnnnnnnnnnnnnnnnnnnnnnnnnnnnnnnnnnnnnnnnnnnnnnnnnnnnnnnnnnnnnnnnnnnnnnnnnnnnnnnnnnnnnnnnnnnnnnnnnnnnnnnnnnnnnnnnnnnnnnnnnnnnnnnnnnnnnnnnnnnnnnnnnnnnnnnnnnnnnnnnnnnnnnnnnnnnnnnnnnnnnnnnnnnnnnnnnnnnnnnnnnnnnnnnnnnnnnnnnnnaaggtaagtgtcggagttaaccttaacttgagggaatagaacccttaaattttttgttatgtgaattaaatgtaaatgacgtataggcgaggtgacgagtgtctatacgtcgtcaaattaattttttgtctgcttacttgaaaaattatacattatttttaatcataaattaattattataataattgtttctttcttattctttgcaactataaattcttgaattcctgcattaattgttatatgctatttaaattatgtgccttaattgttatttgacatttagcataataaatattaaactgcctatttgctccctgattttcataataatttgctatttgtcattgtttgcttcataattaaaccataattaatatatgtttgttgtctcgtaattttatattaattgttacatttattggaaaaaaaatttctataagaattggtaaatgaaaatattggaggtgcgggttgcacaccgcaacatgattgattataatgaatatattggaggagcaggttgcacgccgcaacagaactgaatgtggatatattgtgagagcgggttgcacgctgcaacagaaataatggaaatgataattagttataactgctgagttgcttttaattattataaatgaattacctgatttattcctattattgctgttgttactaatattgcgtataggttaatgtaagtgagccgccttagcctcgtcactacttcatccaggttaggctcagcacttaccagtacatgggatcggttgtactgatactacactctgcacttcttgtgcagatttaggagttggtcccagcggcgtgccatagttttactcggatttctgctactcggaggagacttgaggtataactgcatggcgtccgcagttctgaagttcctgtctatttcactttagctgtgtgttcatttccaaacagctttactttattcagacctttaattatatttattctagaagctcgtgcacttgtgacactaattctgggatggtatttagacaccgttgtttgatggattattttactatatttcaaactttgcttccgcttttgtttccttgattattaataatgtaaagattgtttaaaaattggttaatattattctaatgttnnnnnnnnnnnnnnnnnnnnnnnnnnnnnnnnnnnnnnnnnnnnnnnnnnnnnnnnnnnnnnnnnnnnnnnnnnnnnnnnnnnnnnnnnatggttcgaaggtgggaaattcgggtcgtgacagttggtatcagagcactaggttacataggtctcacgagtcacgagcaagcttagtagagtctgaannnnnnnnnnnnnnnnnnnnnnnnnnnnnnnnnnnnnnnnnnnnnnnnnnnnnnnnnnnnnnnnnnnnnnnnnnnnnnnnnnnnnnnnnnnnnnnnnnnnnnnnnnnnnnnnnnnnnnnnnnnnnnnnnnnnnnnnnnnnnnnnnnnnnnnnnnnnnnnnnnnnnnnnnnnnnnnnnnnnnnnnnnnnnnnnnnnnnnnnnnnatgaaccattctactcttattctctcgcagatggtgagaacgcgtaatacttctaccgatggacagggaccagaacctccggtggcaactatggccaggggtagaggtcgaggtcgtgctagaggctgaggcagaggccgaggtagagctcaatccagagctcgagcagctgcacttgttgtagaaccttaggtagaccttcaggagaaggtcccagttcagaatgtaccagttggaccagttcaggtcccgaaaggcttcatagccactctagtgctttaggacgctctagtccgattggtgagtcttatggagggtgtggcccagaatggtacatttccagtggcaccagccgtctcacgggctgggggaggagcacaaactcccactactcccaccccggagcagatggctccccagaatcaggctccagcagccccgctagttggggtagttcagccagttgttgcagcacagaccggtgataggcccaccatgtctttggaggccttattgagactggataatttcactaagctctttccagttcacttcagtggtacaccttctgaggacccacaggattatcttgaacgctgccatgaggtgctgcggaacatgggtatagttgagaccaatggggttgattttggtgtattccagatgacgggttccgccaagaggtggtggagagactacacattgacccgaccagtcggattgcctgcacttacctgggagcagttctcttagctatttctggagaagttcctccctatcacactgagagaggaatttcacaagcaattcgagcgtctacagcagggcagtatgactgttactcagtatgagtcccattttgtggatttggcccgtcattctctccttttactacctacggagggagagagagtgagtaggttcattgagggactcacacacccatcagacttcagatagccaaggagaccggaggtgagatttcttatcaggcggctgctaatgttgcgaggaggatcgagatggttcttgcacaggaaagagggcagaggtccgataagaggcctcgtcagtttggtggttatagtggtacctcgtctggaggccggggtaattttggtaggggtcatcctcctagatcatttcattcagcacttcatgtatctcccggtgcttcagggagtcacggtcctattatgccttactctgggcagccagtattcagtgcacattcagctcctatcagtgcaccaccactccagagttactacagtggttatccggcccatctaggtcagcttcagcttcggcagccacgacatccagatgggtgttatgagtgtgggaacattggtcacatcaggaggtattgccctagattggcgagtaacagatctcggcaagattctcgtgccnnnnnnnnnnnnnnnnnnnnnnnnnnnnnnnnnnnnnnnnnnnnnnnnnnnnnnnnnnnnnnnnnnnnnnnnnnnnnnngcaccacctgctcagccagctagaggcaggggtcaggcagttagaggtggaggtcaggccattagaggtggaggtcaggccattataggtggaggtcagaccgttataggtgaaggccacccagttagaggccgtcccagagatgtagttcagagtggtgagggccagccccggttttatgcttttccagctaggtccgaggccgagtcatctgatgctgtgatcacatgtattattctagttttccatagagatgcttcagttctatttgatccaggatctacttattcctnnnnnnnnnnnnnnnnnnnnnnnnnnnnnnnnnnnnnnnnnnnnnnnnnnnnnnnnnnnnnnnnnnnnnnnnnnnnnnnnnnnnnnnnnnnnnnnnnnnnnnnnnnnnnnnnnnnnnnnnnnnnnnnnnnnnnnnnnnnaagtgcttctgtgtgtgcatctacaccggtgggagactctgtggtagtagatcatgtctaccgttcgtgtgtagttacaattggtaatcttaaaactagtgtggatcttctacttcttgatatattgattttgatgtcattttgggtatggattggctgtctccttatcatgctatattggactgtcatgccaagatagtgaccctagctatgccggggttacctcgattagagtggaaaggaactcctggccattctgccagcagggttatttcttatatgaaagctcggcgtatggtagagaaagggtgtctagcctatttggcttatattcgcgatcccagtgccgatgtcccttctatggactcagtaccagttttttgtgaatttttagaagtatttcctgcagatctgccggggatgccacccgacagagatattgacttctgtattgatttggctcttggcactcggcccatttctattccaccataccgtatggccccgccaaagttgaaagaattgaaagagcaattgtaagacttgcttgatcagggattcattagacccagtgtttcgccatggggtgcgcaagtattatttgtaaagaagaaagatggctagatgcagatgtgtatagactataggcagttgaacaaggccactatcaaaaacatatatctgcttccaagaattgatgacttatttgatcagcttcagggtgccaaggtattttcgaagattgatttgagatctggttaccatcagttgaagattagggcatctgatgtccctaagacagcttttcggactcggtatgggcattacgagttcctagtgatgtcatttgggttgacaaatgctccagcagcatttatggatttgatgaatcgggtgttcaagccttatttggattcttttgtggttgtattcattgatgatatcttgatttactccagcagtcgagaggagcatgagcagcatcttcgaagtgtgcttcacaccttgaagaataatcagttatatgccaaattttcaaaatgtgagttttggttagactcagttgcctttttggggcatgttgtatcggcagaaggcataaaggtggatcctaagaagattgaggttgttcagagttggcctagacctacttcggttacagagatccggagtttcctgggtttggcaggttattatcgtgggttcgtggaagggttttcatctatagcaagtaccttgaccagactaacccagaagggtgttccattcagatggttagacgagtgtgagttgagttttcagaagctctagaccgctttgactacgacgccagtattggtattacccacaggttcaggatcgtatacggtatattatgacgcatctcacattgtgcttggtgcattattaatgcaagatggcaaggtaattgcatatgcatcgcgtcagttaaaagttcacgaaaagaattatcctgttcatgacctagaattggcagccattgttcatgtgctgaagatttggaggcattacctctacggtgtctcgtgtgaggtatttactgatcatcgtagccttcagtatctgttcaaacaaaaagatcttaatttgaggtagagaagatggttggatttgttgaaatactatgatatcaccattttttatcaccccgaaaagaccaatgtggtgatcgatgctttgagtaaaaaggctgtgagtatgggcagtcttgcgtatattccggttggtgagaggccattagctacagatgttcagactttggctaatcagttcgtgaggttagatgtttcagaacccagtcaagttctagcttgtacagtcgctcggtcttctttatatgagtgcatcagagagaggcagtatgatgatcctcacttacttgtccttaaggacacggtgcggcacggtgattccaaacaggttactgtgggggaagatggagttctgcgaatgcagggccgtatttgtgtgcctaatgtggatgggctttgtgaattaattcttgaagaggcacacagtnnnnnnnnnnnnnnnnnnnnnnnnnnnnnnnnnnnnnnnnnnnnnnnnnnnnnnnnnnnnnnnnnnnnnnnnnnnnnnnnnnnnnnnnnnnnnnnnnnnnnnnnnnnnnnnnnnnnnnnnnnnnnnnnnnnnnnnnnnnnnnnnnnnnnnnnnnnnnnnnnnnnnnnnnnnnnnnnnnnnnnnnnnnnnnnnnnnnnnnnnnnnnnnnnnnnnnnnnnnnnnnnnnnnnnnnnnnnnnnnnnnnnnnnnnnnnnnnnnnnnnnnnnnnnnnnnnnnnnnnnnnnnnnnnnnnnnnnnnnnnnnnnnnnnnnnnnnnnnnnnnnnnnnnnnnnnnnnnnnnnnnnnnnnnnnnnnnnnnnnnnnnnnnnnnnnnnnnnnnnnnnnnnnnnnnnnnnnnnnnnnnnnnnnnnnnnnnnnnnnnnnnnnnnnnnnnnnnnnnnnnnnnnnnnnnnnnnnnnnnnnnnnnnnnnnnnnnnnnnnnnnnnnnnnnnnnnnnnnnnnnnnnnnnnnnnnnnnnnnnnnnnnnnnnnnnnnnnnnnnnnnnnnnnnnnnnnnnnnnnnnnnnnnnnnnnnnnnnnnnnnnnnnnnnnnnnnnnnnnnnnnnnnnnnnnnnnnnnnnnnnnnnnnnnnnnnnnnnnnnnnnnnnnnnnnnnnnnnnnnnnnnnnnnnnnnnnnnnnnnnnnnnnnnnnnnnnnnnnnnnnnnnnnnnnnnnnnnnnnnnnnnnnnnnnnnnnnnnnnnnnnnnnnnnnnnnnnnnnnnnnnnnnnnnnnnnnnnnnnnnnnnnnnnnnnnnnnnnnnnnnnnnnnnnnnnnnnnnnnnnnnnnnnnnnnnnnnnnnnnnnnnnnnnnnnnnnnnnnnnnnnnnnnnnnnnnnnnnnnnnnnnnnnnnnnnnnnnnnnnnnnnnnnnnnnnnnnnnnnnnnnnnnnnnnnnnnnnnnnnnnnnnnnnnnnnnnnnnnnnnnnnnnnnnnnnnnnnnnnnnnnnnnnnnnnnnnnnnnnnnnnnnnnnnnnnnnnnnnnnnnnnnnnnnnnnnnnnnnnnnnnnnnnnnnnnnnnnnnnnnnnnnnnnnnnnnnnnnnnnnnnnnnnnnnnnnnnnnnnnnnnnnnnnnnnnnnnnnnnnnnnnnnnnnnnnnnnnnnnnnnnnnnnnnnnnnnnnnnnnnnnnnnnnncctgagttaggcacgcgggtggagttgagtacaacatttcatccacagacagacggacagtcagagtgcactattcagatattggaagatatgnnnnnnnnnnnnnnnnnnnnnnnnnnnnnnnnnnnnnnnnnnnnnnnnnnnnnnnnnnnnnnnnnnnnnnnnnnnnnnnnnnnnnnnnnnnnnnnnnnnnnnnnnnnnnnnnnnnnnnnnnnnnnnnnnnnnnnnnnnnnnnnnnnnnnnnnnnnnnnnnnnnnnnnnnnnnnnnnnnnnnnnnnnnnnnnnnnnnnnnnnnnnnnnnnnnnnnnnnnnnnnnnnnnnnnnnnnnnnnnnnnnnnnnnnnnnnnnnnnnnnnnnnnnnnnnnnnnnnnnnnnnnnnnnnnnnnnnnnnnnnnnnnnnnnnnnnnnnnnnnnnnnnnnnnnnnnnnnnnnnnnnnnnnnnnnnnnnnnnnnnnnnnnnnnnnnnnnnnnnnnnnnnnnnnnnnnnnnnnnnnnntgtttgaaccgggagaggctcggttgttgagtaccgatttggtacagtatgccttagataaggtcaagattattcaggatcgagttcgcacagctcagtctaggcaaaagagttatgccgaccgtaaagttcgtgatattgcattcatggttggagaacgaatattgctccgggtttcacctatgaaaggtgtaatgaggttcggaaagaagggcaagttgagccctaggtatatcggaccctttgaaattcttgaaagggtgggtgaagtagcctacaggcttgcattaccaccaagtttatcagcggttcatctggtcttccatgtgtctatgctacggaaatatcatggtgattcgtcccatgtgttagatttcagcttagtccaattggacaaagatttgacttacgaggaggagccggtggctattctagcctggcaggtctgacagttgaggtcaaagagttatccttcagttcgggtgcaatggagaggtcatccggtagaggcatctatctgggagtccgagtcatacatgcggagtaaatatccacaccttttctccagctcaggtactttttctaactccgttcgaggacgaacgtttgttttagaggtagagaatgtgatgacccaaaatgtcatctttaaatttaataagtaattctatgttctaagacctagaaaagcatcatttatcattcctcgacttgcatgcgcagtccgtacaatttttcggaaagtttttatgtgaaaaatagattaaaataggaaatagagctttaaaattcaagcgagttgactttggtcaaattttttagtaaacggacccggatcagtattttgacagtttcggtagctccgtatcgtgatttgggagttgggcgtatgcctgaaatttaatttggaggtccctagttcaagttatgaccatttaacggaactagcaatttaaaggctaaatattccaagtttgaccacagggttgacattttgatatcggagtcggaatccgattctaaaaatttgaacagctctgttatgtcatttatgacttgtgtgccaaatttgaagtcattccggattcatttaatatgttttggcacgaggtttgcaaattgaaaagtttaaaactcaaagttcgaatcgaggtatgaattgcaatttcgatgttatttgatgtgatttgagaccccgagtaagtccgtattatgttatgggacttgttgggatatttggataaggttccgaggggctcgggtgagttttggacgaaattcggattgtttagagcatgttgaaagcagcaggttcttggcagaacctggtgtaatcgcacctgcgcaatggtggtcgcaggtgcgcaaccgcatctgcgagaagctggtcgcttctgcgacctgggcattggccagttgcatcgcttttgcggagaaatggggtgcaaatacgcgaccgcttctgcggtcgtttggtcgcttctgcgacgtcgcaggtgcaatagaaatgtccgcagatgcagaacctcgcctggcagccctacttcgcaaatgcgagatttatctcgcaaatgcgtgatcgcaggtgtgaaaatatagcccgcaaatgcgaaaatgctgggcagaatacataaaatcgggtcttagccatttttactcttttttgagttttaagtctcggatttgggcgatttcaagggggatttttacg

SEQ ID NO: 3 - DNA, 20 bp, Artificial Sequence
  Description of Artificial Sequence: Synthetic primer
caacctagccactggtccat

SEQ ID NO: 4 - DNA, 20 bp, Artificial Sequence
  Description of Artificial Sequence: Synthetic primer
tcaaaccaagagcgaggagt

SEQ ID NO: 5 - DNA, 22 bp, Artificial Sequence
  Description of Artificial Sequence: Synthetic primer
gggcaatggaaatgaatctagc

SEQ ID NO: 6 - DNA, 19 bp, Artificial Sequence
  Description of Artificial Sequence: Synthetic primer
cttccttcctttcacatag

SEQ ID NO: 7 - DNA, 22 bp, Artificial Sequence
  Description of Artificial Sequence: Synthetic primer
ccattcattttcatccaaaccc

SEQ ID NO: 8 - DNA, 22 bp, Artificial Sequence
  Description of Artificial Sequence: Synthetic primer
cggagtacttttcatgggattc

SEQ ID NO: 9 - DNA, 21188 bp, Nicotiana tabacum
atggatctggtccatcaagatgaagatgtgactgctgaactggaggttcagactcctaagcccaagaaatccaagactttctccaagaagtctacttctatgtcaaagtctgctgaactatccaccctggcaaaaaggaccaggtccacagtgaaaaccatacaagcaaaagttactgaaggagaggcgtggagtagtgaagaggaagatgaatcagacagtgaaaaggacaagatggctaagtttggcaaaagaactattctgaagggtagattcctcaaggatttggaggaggaagggatagtattgctgttggaaaaattagaagtacaaggctggaaggacatggtcctttagatggatggcaagttggctagggatgaaatagttgaatttatggcaaatgctgcagtgctagatggaagggatactagcttagtgaaaggggtgcaaatctcttttgatatgaaggagttgggtggaattctaggtgtacatgatgaagggtacaataattacaaaaagcttaagtggcaaagcctagaaaattttcctactgcccttgccatcaccagaaaattcagtgatcatgagaaggaaagtgtgcccaagactgtgtacaagagtgaaatgaagtcaccccacaaggttttgtttgaatttgtcatcaaatatgttctgcctaggtatgagaggaggcacactgcaaacttcatggacttggttctaatggagtgtctagattgtgggaagtagataaattggcctggatttataatccagtttcttgatagggttatcaatggtaccaagtctcattctattccctatggtttcattcttacaactgtgctttcttgttttaaggtgcctttgaataagtgtgaggtggctacaagcaaagatcactttggggcgaaaactttgattgcttgtgactatgaggtccatgccactcctaatgaacctggttcacatccaagaagataccagtaaatagctcttggtataggaaagtgaggcaaaggaagctaagatagcaaggatgaagacacggttggctgaggtagaatctgagagagatgctctcagaacaaaacttgcaagacaaaaggagaagaatgatggaatttttcaagacatgctgaaacttctccaagaaaataacccagcacctcgttcttccaagcctaaagttcctagcctagtgtagttccttcagtgacccagcttgggatgtttcttttgttgatgtttgctcatgttttcaatatttttatttccttttatgtattgtggaagaatcatatcaactatcaatgaaatcaatgaaatctactggtttttgttctaactgtttgtttttatttctttgatggttgaaattcttagcttaatcaatgatgattaatccatgattgcatttgggatagcccgagtgtacatgagtaagttttacaatccgggtattgcacatttttatgcactttttctatgatgccaaaagggggaaaataagttgtgctttaaacaagcgatatttagctttgaacatgtgatatttataaccttatgaacctggtccttgatgataagtgataacaaggaaaaatatttctaacattttgttgatattaagctgagtttaaacagggcctaagcttatgaaaagcacatagtttgtcatcatcaaaaaggaaaaatttattggcccaagtgaaggtttgttttgaagactgacaaaggaactcaggcatgagccaggtctatcctttgtgaacacgggcagagttgtgcatgtgggatgcacgtgatggagataaacttaacttggcacaattgatatctcctgatcggaaaggttgtataattgattaggagaaggacttcttactcaaagagaacattatccaagatagggaaggagtcagaagttgggatcaactagaacttttccactaaggaagagtagtattagaactctagttatttgttcatatactaactctatatattgtaggatgttctcatttacaggtaatgtacaaatgcagaagttaaacaagaattgagagcaaaatagcaaggcattttgcaagcagtttgtgtgtgattcaagtgtgcaaatatgaatctacatgaaccagatagaagaaccagttccaagtgtctctcttttattctagttcaattatagtaggtgttttcatattgtacctttcagctttatgtagaggcaattgtaatatatactcaaaatattcaatttagagttaacttgaagttgccacaataattagaggttgtgtgctacaacgtgattagagttagtcctaggtttacaaatatttttttgtaaatgcagtttttggttcagtgattttagtggagagtttggaaaaatcctactggaaagtaggtcgtggttttttcaccctttgagccaaatattttcacgtaaaatacttgtgttttttacttttcgcatttactatttctgcaatagtaggttaaggatcacttagaagaatcacgttcttccataatcagtttaagtaaaaaattggacaccacacaaattatcctttgtgtggtattgaagttgaaacatcaatgttatgcgtatgatcttcccacaaagtttaacaaggatctgttcaaaaaattaccctgatttagacccgtggagttctatctccttgttttgtatgacttttcttgtgggaaggtggatggtgttgcgtgtggcagtgttggtggggagagataaggagaaagtagatggtggtgaaaggtgttccatgtctgcaatgtgtgcatatctaatagtaatatacgttaacttaggttcaggtgttcaataggaataaagtttagtttaggtatctaaattaaaaaggcggacaagttccaggggagcatatgtatttgaccttggataaagatgcagattctattttatacaattatgacatgtatcaatcgcctattttgtacattgcacttcctttctgtagtagtaagtgtattcctagcagtttctcttttacgtatttagttttctcattgtcttaagaggtctttggggaattcagttttcctgcgaggatactctatggagtatatgtaatgtttatgatcactgcgactgtttcttaacttaatactagtaaggcaagcccgtgctacgcacgggtccaacactattaacataacttttctgatacaaaagatattttctgtattaagttcaattaacacataaaaacttgagagtttgaaaattggatacaacttctaatgcaattttatttttcgtcatctgaagccaccttcccgttgcaatctcaataaagggaaacctttgaagaaaaaatgagttgaaatctctttatttcatgacggagtaatataaaattataaattataaggttggaaaatcattctaaataacaaaagtgatgaaattcacttgcttgaaaaatgcggaagacaaaataaaagaataacagggttctggttcaaaacattgcgtatacttaaaaaggaaataatacattcaataaatatcactttctcaactttcctaaaacatttggacataaaaaagatacatttactatctcatattaaattcttctaggcacttgatgcgattatataccgcccttttgttggtttcctttacactacaatcacgtaagaacagatcaatataacgcatcaactcttgatgccttaacattatcctctgaactcttatggcagatcaaaggaaactattccaaaaatattttattgaccattatcttcgtattttggagctttgtaaatttgctttatagatgacacaatgttattcctcttaacattattccaaagtttggcgaacttgatattttcacttattaagtccttatatgaagagctagcttacaaagatcaaatgatttgtcttcaacctgcagtaaagagcaacaacttaatgagagaacacaagtgaactcataaagagccattttacaactttcaacaatgtggccgtttagaaatcaaatattccatgtccaaaaaaaccttaaagtacaagaactatttgattatctaataattttggattttatatttcatccaagagtttctaaataaagatataaaatgtcagaatgaaaattcgatgaccaacaacttatgacagaatatgtgtattcattgtgtgtgatgatccaaagggtcataaccggttttctacctttttctgggctttcgaggtcttgaaaacctcatctttagttgcctcgatttgcgtgcatagtccaggcgcgtagccggaaaagcttatgtgttaaattatgtgaaatttgataaattgtggctttaaaatggttaaagttgattttggtcaacattttgggtgaacgaacccggacccatgatttgatggtcccgaaggatctgtagaaaaatatgggactcgggcgtatgcctggaatcgaaattcgaggtcccgagcccgagaaatgaatttttaaaagaaattgttttttgaaatttaatatgaaaatttgaaataaaaatgaattagaaagcattggtatcaggcccgtattttggttcaggcactcgatacaggtattatatgtggtttaagcgctttctatgaaatttggttgaaatcggacgtcatttgacgtgtttcggacctaaaactctaaatttgaaagtttatgaagtttgatagaaaaaaatgatgattttgaggcttgattcattgattttgatgttattttggcgatttgatcgcttgagtaagttcataggatgttattgagttagtgtgtgtgtttggttaggagccccgagggctcgggagtgattcagaggcggttcggggtgtttttgaccttaggaagtgttgcagaatttctgcagtcagtgcccagtcattttcttctatgcgatcacataggtatgtctgcaatcgcgtagagttattttggagtcgcccagttttgttctatgcgatcgcgttataggccatgcaatcgcgtacctctgtaaactcattctatgcgatcacacactcccttctgcgttcgcaattcacaaaaggcctagccccgctttgaccctctatgcgatcgcactcgtcatcccgtgattgcagtgaccagcctaccttcccctatgcgatcgcattccctttcccgcgatcgcatagggcaattccgcccagttattttaaaagtccaaaacagacccattacgggagttctaccatttttcataaaacttgtcttctccaagctctaggggcgatttttgaagctcttcttcatcaaagtcttttgggtaagtaatttcccacctatttccttcactcttcttcattaattactgaaattctaaacctaaatcatgaaatcaaagtagaaattaggagttttgggtagagttatgtttttggaaattttgagtgattcaacctgaatttggggtcggatcttaaaataaattatatatttgaactcgtggggttatgggtaatcaggttttggtccgaccctcgtgtttggaccatgtgggcccggggtctaattttggtatttttggaagaatgctaggaacttcatatctaagctatgtgattttgttatcgagtctttattgatattattgaattaattatgcctagatatcgttgtttcggagtcggattataaaggaaaggcggtatttgagggttgattgctattctttggaccgaggtaagtgtttgttctaactttggcttgagggaataggattagagtgttgtttgctatttgctaattgttgagtacggtgtataggcatggtgacgagtatctatacaccggagtctagcatgaccgtgagtcttatttgtgtttattcggattttgtgatacctcttccttgttaaattgataaatttcatataatgtgaagagtttgaggaagaattatgatttgtacattcttggagcattggctcgagtatatcataaagcgtgaaagtatatgaaatgattgaacccctttggagcgttggctcaggtggtaaagtgagataagaggtaaaagtgaaagaaagagaaagaattattgaattgctcccttgccgggatgcttgttgctttgttgactatctcttgccgggatgctattgttgacccttgcctgagattattgatattgttcccttgccgggtttttaactgcttaattgtgctcccttgccgggagttagctgtttatttgtattcccttgccgggatttctatcattatttgtctactcccttgccccttgtttgtgattgttgcttgggtgaggaagagtgataaagcacgaagggtgatgccgtgcattgtttgctattgtgaggaaagagtgtaaagcactgatgtgatgaaattgagtgtaaagcacgaagggtgatgccgtgattgattgatatggtgaggaaagagagtaaaagcacgaagggtgatgccgtgcatatttcatttatatgattgctttggtgaggacgagagtaaaagcacgaagggtgatgccgtgcatttgttgctttctgattctttgttgatatccgagttatgttgtttctttcattacttgttcttatttgatttacttcgaggttatagatttccttaccctatttgccttgtgattgttgtttgggtgaggaagagcgtaaagcacgaagggtgatgccgtgcaaattgttgacttttgattcttgttgacattctggctttgttacttctttctgttattgaggatttctatttgaaactgttagctccccatagcatgctcccccctcttagctgtttaaattctgtatatttccttttattgcatatatctgcacaggttgtttttggtaggtcctgtctagcctcgtcactacttcgccggggttaggccaggcacttaccagcacatggggtcggttgtgctgatgctacactctgtgcatctttttgcacagatccaggagcagcttttggacctcagcagtaggatttgatcgggagctgacttcagtccagagacaccgaggtagccttgctgacgtccgcaggcccggagtctctctctctttattcagtttgttatcttttgtaccgaaacaaacagtttataattttctttcagacgattgtatttagtaaatcttagaagttcgtgagcattgtgacaccaatcttgggtagaggattatgttaaactttccgcatttctattcagtttttatataagttaagacttccgcttgaaatttttaattatgttgcctttattacatgttgataattatggaaaagaatgtgtgttaaacggaaggtaatttaagttggcttgcctagctcctattagtaggcgccatcacgaccccgagggtgggaaatccgggtcgtgacaagttggtatcagagcactaggttacttaggtctcacaactcacggacaagctcggtagagtctgagggatcggtacggagacgtctgtatttatcccgcagaggctactgagttaggaaaacttcacatctgttctttcttgtcgtgcggttctgtttccccaatactgattgaatttctactccgttctttcgcagatggcgaggacacgcgcttcctcatcgaccgcgcagcagcccgagcccccagtagcagctcctattaggggcagagggggcgaggccgtgccagaggccgaggcaggggcagagctcagccccgagcagcagttccagaggtggagcctcatgttgattatgatgaggaggttccagctccagcagctccggtgggcccagctcaggtcccagagggtttcattgccaccccagttcttcaggacgccctggttcgattggtgggccttatggagagagtcacccgaacaggtttgcttcctgtagcaccagccacttctcaggctggaggaggggctcagactcctgctacacgcactccggagcaggtagctccccagattcagactccagcggttcagccagttggggtagttcagccgggtgccatagctcagaccggcgatggagcggctatgtccgccgatgctttgtggagactggataggttcaccaagctcttcacttctacttttgccggtgcatctactgaggatccccaggattatctagacagctgccacgaggttctcagaaacatgggtattgttgagaccaatggggttgattttgctacatttcgcttgtctggatccgccaagacttggtggagggattattgcttagcgagaccagccggatcgccatctttgacttgggagcagtttacagtgttgtttctagagaagtttctccccgttactcagagagaggcctatcggaggcagtttgagcgcctccagcagggttctatgactgttacccagtatgagaccaggttcatcgatttagctcgccatgctctcatcatacttcccaccgagagagagagggtgagaaggtttattgatggtcttattctgccgattcgtcttcagatggccaaggaggccgggagcgagatcacatttcaggaggcggccaatgtggcccgcagagttgagatggttctgtcacagggaggtggtcatgggtcggataagaggccccgtcattcaggcagattcagtggtacctcgtctggaggtagagattcgtatggtagaggccatcctcctaggccctttcagtcagctctccaggtatcacatggtatctcaggtggtcgtggttctcagacgcattatttggatcagcagtccttcagtgcaccaccagctcccatcagtgcaccgccgcttcagagtttccgaggtggtcattcaggcgacagggtcagcagtctcagcagccgagggcttgttacacttgtggtgatatgggtcacattgccaggttttgccctcgagcttcgggtagttctcagcagcagggtcctcgtcctatgattcaggcaccagttgctccacagcctgcccagccagctagaggcgggggtagaggacatagaggtggaggtagaggtcatagaggtggagctcagaccgccagaggtaggggtcagccagcagccgatcgtcccagggatgtgattcagggaggtggggcccagccccgatgttatgctttgccagccaggccagaggctgagtcatccgatgttgttattacaggtactattttggtctgtgatagagatgcttcagtgctatttgaccctggatctacgtattcatatgtgtcgtcctattttgcaccctacctggttatgcctagtgaggccttgagtattcctgtgtatgtatctacaccagtgggtgattctatagtggttgatcgggttcatcgttcctgtgttgtggtgtttaggggacttgagacccgtgttgatttgttgctcttagatatggtggatttcgacgttatattagggatggattggttgtccccgtatcatgcgatcttggattgtcatgccaagactgtgactttagccttaccggatttgccccttagagtggagagggagactcccctgttatttctatgtgaaggcgtatggtcgagaaggggtgtttggcctacttggcttatgttcgtgattccagtgctgagattccctctattgattctgtgcccgtggttcgtgagtttcctgaggttttcccatcagacttgccagggatgccacccgatagggatattgatttttgcatcgatttggctccgggcactcagcccatttctattccgccatatcgcatggccccgccagagttgaaagagttgaaagagcagttgcaagacttgcttgagaagggtttcattagacccagcgtatcgccttggggtgcgccggttctgtttgtaaagaaaaaggatggctcgatgagaatgtgcattgattaccggcaattgaacaaggttacaattaagaataagtatccactgccgaggattgatgatttgttcgatcagcttcagggtgccaaggtattttcaaagattgacttgagatctggctaccatcagttgaggattagggcatccgatgtccctaagacagcattccgcactcggtacgggcattatgagttcttggttatgtcatttgggttgaccaatgccccagcagcctttatggatttgatgaaccgagtgttcaggccttatttggactcgttcgtgatagtcttcattgatgatattttgatatattcccgcagccgggaggagcacgagcagcatcttagagtggttcttcagaccttgagggatagtcagttatatgctaagttctcgaagtgtgagttctggttgagctcagttgcatttctgggtcatgttgtatcagcagagggtattcaggttgatccaaagaagattgaggcagtcaagaactggcctagaccagcatcagcctagagattcggagtttcttggggttagcaggttactatcgtcggttcgtggaggggttctcatctattgcagccccgatgaccaggttgacccagaagggagcccagttcagatggtcggacgagtgtgaggcgagctttcagaagctcaagacagctctgactacggcaccggtattggttttgcccacaggttcagggccttatacagtctattgtgatgcatctcgtattggacttggtgcagtgttgatgcaggatggcaaggtcattgcctatgcttcgaggcagttgaaggttcatgagaagaactatccagtgcatgatttggagttggcagccattgttcacgcattgaagatttggaggcactatctgtatggcgtggcgtgtgaggtgttcacggatcataagagtcttcagtatttgttcaagcaaaaggagttgaatttgaggcagaggaggtggttggagttgttgaaagattatgacatcactatcctatatcacccgggaaaggccaatgtggtggccgatgccttgagtaggaagtcagccagtatgggcagtcttgcttatattccggtcggtgagagaccgcttgctttggacgttcaggctttggccaatcagttagtgaggttggatatttctgagcctagtagagtattagcttgcacggtcgctcgttcttcgttattggagcgtatccgtgatcggcagtttgatgatccccatttgtgtgtccttagagacacggtacagcgtggaggtgccaagcaggttaccttagatgctgatggagttttgagattgcagggtcgagtttgtgtgcctaatgtggatgggcttcgagagttgattttagaggaggcccatagctcccggtactctattcatccgggcgccgcgaagatgtatcaggacttgcggcagcattattggtggcgtagaatgaagaaggatatcgttgcctatgtggctcggtgtttgaattgtcagcaggttaagtatgagcatcagaggcctggtggtttatttttggagtggaagtgatcactatggacttcgttgttgggctcccgcagactcggaggaagttcgacgcagtttgggtcattgttgataggctgaccaagtcagcgcatttcattcctgtggcagtctcctattcatccgagaggttagctgagatctatatccgggagattgttcgccttcatggtgtgccggtatctatcatttcggaccgaggtacgcagtttacctcgcgtttctggaaagcagtcagcgagagttaggcacccaggttgagttgagtacaacatttcatcctcagacggacgggcagtccgagcggactattcagatattggaggatatgctccgagcttgtgtcattgactttggaggttcgtgggatcagttcttgcctttagcagagtttgcctacaacaacagctaccagtcgagtatccagatggctccttatgaggctttgtatggtaggcgatgtcgatctccggttggatggtttgagccgggagaggctcggttgttgggtacagatttggttcaggaggcttggacaaggtcaggatcattcaggataggcttcgtacagctcagtccaggcaaaagagctatgcagatcgaaaggttcgagatgtggctttcatggttggtgagcgggtattgctccgagtgtcgcctatgaagggcgtgatgagatttgggaagaagggcaagcttagccctaggttcattggtccatttgagattcttgatcgagtgggagaggtggcttatagacttgcattgccaccgagcttatcagccgtacatccagtgtttcatgtgtccatgcttcggaaatatcacggcgatccatcccacgtgttagatttcagcactgtccagttggacaaggacttatcttatgaggaggagccggtagctattctagaccggcaggttcgccagttgaggtcgaagagttttccttcggttcgtgttcagtggagaggtcagcctcctgaggcatcgacctgggagtccgagtccgatatgcgggaccgttatcctcaccttttccccgactcaggtacttccttcttatgtccgttcgaggacgaacggttgttttagaggtggagaatgtgacgacccaaagggtcatcaccggttttctccctttttcgtgcttccgaggccttgaaaacctcacctttagttgcctcgatttgcgtgcgcagtccgggcgcgtagccggaaaagcttatgtgttaaattatgtgaaatttgataaattgtggctttaaaatggttaaagttgactttggtcaacattttgggtaaacggacccggacccgtgatttgacggtcccggagggtccgtagaaaaatatgggactcgggcgtatgcccggaatcgaaatccgaggtcccgagcccgagaaatgaatttttaaaagaaattgttttctgaaatttaatatgaaaatttgaaataaaaatgaattagaaagcattggtatcgggcccgtattttggttccggcgcccggtacaggtcttatatgtggtttaagcgctttctgtgaaatttggttgaaatcggacgtcgtttgacgtgattcggacttgaattcctaaatttgaaacttgatgaagtttgagaaaaactcttgattttgaggtttgattcattgtttttgaagttatttaggcgatttgatcgcacggataagttcgtatgatgttgttgagttagtgcatgtgtttggttaggagccccgagggctcgggtgtttgtttcggaatggttttagacttagaaaaattgcagaactgctgtctgctggtgtccagtcttttgtgctatgcgatcgcatagctatgtccgcgatcgcatagtgtaaattttcagggttttagtttgttctatgcgatcgcatagttagtagttagcctgagaggtcctatattttgctctacgcgatcgcattatttcctctgcgatcgcagtgtgttagccagccttcactatttcctttatgcgatcgcatagtgtcattcgcgatcgcagagccctgtcccatttactctatgcgatcgcactcctttgtccgcgatcgcataggccaaattcgcccagttaaattttaaaatccagaacagtagccttacgggattcttacaaaatttcacaaactctttcttctccaaagttctagggcgatctttgaagcattctttcaccataaactcttgggttagtaatctttaacttattctcttccattttcatcaacatctattgaatttcttggcctaaaacatgtaatttagggtagaaattgggggagtgggtagagttagggctttttactttttcttgatttggacctcgttttggggtcgaatttgaaaaaattatatattcgggctcgtggatgaatgggtgatatggttttggtccgaacctcgtgtttggaccatgtgggcccggggtcgaattttggtatttttggaagaatgctaggaacttcatatctaagctatgggattttgttatcgagtctttattgatattattgaattaattatgcctagatatcgttgtttcggagtcgggttataaaggaaaggcaatatttgagggttgattgctattctttggaccgaggtaagtgtttgttctaactttggcttgagggaatatgattaaagtattgtttgctatttgctaattgttgagtacggtgtataggcatggtgacgagtatctatacaccggagtctagcatgaccgtgcctcttatttgttttttttcggatttaatgatacctcttccttgttaaattcataaatttcatataatgtgaagagtttgaggaagagttatgatttgtacattcttggagcgttggctcgagtgtatcataaatcatgaaagtatatgaaatgattaaacccctttggagcgttggctcaggtggtaaagtgagataagaggtaaaagtgaaagaaagagaaagaattattgaattgctcccttgccgggatgcttgttgctttgttgactatctcccttgccgggatgcttgttgttttgttgactatctcccttgccgggatgcttgttgctttgttgactatctcccttgccggaatgctgagattattgttattgttcccttgctgggttttttttaactgcttaattgtgctcccttgccgggagttagctgtttatttgtattcccttgccgggatttctatcattatttgtctactcccttgccccttgtttgtgattgttgcttgggtgaggaagagtgataaagcacgaagggtgatgccgtgcattgtttgctattgtgaggaaagagtgtaaagcactgatgtgatgaaattgagtgtaaagcacgaagggtgatgccgtgattgattgatatggtgaggaaagagagtaaaagcacgaagggtgatgccgtgcatatttcatttatatgattgctttggtgaggacgagagtaaaagcacgaagggtgatgccgtgcatttgttgctttctgattctttgttgatatccgagttatgttgtttctttcattacttgttcttatttgatttacttcgaggttatagatttccttaccctatttgccttgtgattgttgtttgggtgaggaagagcgtaaagcacgaagggtgatgccgtgcaaattgttgacttttgattcttgttgacattctggctttgttacttctttctgttattgaggatttctatttgaaactgttagctccccatagcatgctcccccctcttagctgtttaaattctgtatatttccttttattgcatatatctgcacaggttgtttttggtaggtcctgtctagcctcgtcactacttcgccggggttaggccaggcacttaccagcacatggggtcggttgtgctgatgctacactctgtgcatctttttgcacagatccaggagcagcttttggacctcagcagtaggatttgatcgggagctgacttcagtccagagacaccgaggtagccttgctgacgtccgcaggcccggagtctctctctctttattcagtttgttatcttttgtaccgaaacaaacagtttataattttctttcagacgattgtatttagtaaatcttagaagttcgtgagcattgtgacaccaatcttgggtagaggattatgttaaactttccgcatttctattcagtttttatataagttaagacttccgcttgaaatttttaattatgttgcctttattacatgttgataattatggaaaagaatgtgtgttaaacggaaggtaatttaagttggcttgcctagctcctattagtaggcgccatcacgaccccgagggtgggaaatccgggtcgtgacaagttggtatcagagcactaggttacttaggtctcacaactcacggacaagctcggtagagtctgagggatcggtacggagacgtctgtatttatcccgcagaggctactgagttaggaaaacttcacatctgttctttcttgtcgtgcggttctgtttccccaatactgattgaatttctactccgttctttcgcagatggcgaggacacgcgcttcctcatcgaccgcgcagcagcccgagcccccagtagcagctcctattaggggcagagggggcgaggccgtgccagaggccgaggcaggggcagagctcagccccgagcagcagttccagaggtggagcctcatgttgattatgatgaggaggttccagctccagcagctccggtgggcccagctcaggtcccagagggtttcattgccaccccagttcttcaggacgccctggttcgattggtgggccttatggagagagtcacccgaacaggtttgcttcctgtagcaccagccacttctcaggctggaggaggggctcagactcctgctacacgcactccggagcaggtagctccccagattcagactccagcggttcagccagttggggtagttcagccgggtgccatagctcagaccggcgatggagcggctatgtccgccgatgctttgtggagactggataggttcaccaagctcttcacttctacttttgccggtgcatctactgaggatccccaggattatctagacagctgccacgaggttctcagaaacatgggtattgttgagaccaatggggttgattttgctacatttcgcttgtctggatccgccaagacttggtggagggattattgcttagcgagaccagccggatcgccatctttgacttgggagcagtttacagtgttgtttctagagaagtttctccccgttactcagagagaggcctatcggaggcagtttgagcgcctccagcagggttctatgactgttacccagtatgagaccaggttcatcgatttagctcgccatgctctcatcatacttcccaccgagagagagagggtgagaaggtttattgatggtcttattctgccgattcgtcttcagatggccaaggaggccgggagcgagatcacatttcaggaggcggccaatgtggcccgcagagttgagatggttctgtcacagggaggtggtcatgggtcggataagaggccccgtcattcaggcagattcagtggtacctcgtctggaggtagagattcgtatggtagaggccatcctcctaggccctttcagtcagctctccaggtatcacatggtatctcaggtggtcgtggttctcagacgcattatttggatcagcagtccttcagtgcaccaccagctcccatcagtgcaccgccgcttcagagtttccgaggtggtcattcaggcgacagggtcagcagtctcagcagccgagggcttgttacacttgtggtgatatgggtcacattgccaggttttgccctcgagcttcgggtagttctcagcagcagggtcctcgtcctatgattcaggcaccagttgctccacagcctgcccagccagctagaggcgggggtagaggacatagaggtggaggtagaggtcatagaggtggagctcagaccgccagaggtaggggtcagccagcagccgatcgtcccagggatgtgattcagggaggtggggcccagccccgatgttatgctttgccagccaggccagaggctgagtcatccgatgttgttattacaggtactattttggtctgtgatagagatgcttcagtgctatttgaccctggatctacgtattcatatgtgtcgtcctattttgcaccctacctggttatgcctagtgaggccttgagtattcctgtgtatgtatctacaccagtgggtgattctatagtggttgatcgggttcatcgttcctgtgttgtggtgtttaggggacttgagacccgtgttgatttgttgctcttagatatggtggatttcgacgttatattagggatggattggttgtccccgtatcatgcgatcttggattgtcatgccaagactgtgactttagccttaccggatttgccccttagagtggagagggagactcccctgttatttctatgtgaaggcgtatggtcgagaaggggtgtttggcctacttggcttatgttcgtgattccagtgctgagattccctctattgattctgtgcccgtggttcgtgagtttcctgaggttttcccatcagacttgccagggatgccacccgatagggatattgatttttgcatcgatttggctccgggcactcagcccatttctattccgccatatcgcatggccccgccagagttgaaagagttgaaagagcagttgcaagacttgcttgagaagggtttcattagacccagcgtatcgccttggggtgcgccggttctgtttgtaaagaaaaaggatggctcgatgagaatgtgcattgattaccggcaattgaacaaggttacaattaagaataagtatccactgccgaggattgatgatttgttcgatcagcttcagggtgccaaggtattttcaaagattgacttgagatctggctaccatcagttgaggattagggcatccgatgtccctaagacagcattccgcactcggtacgggcattatgagttcttggttatgtcatttgggttgaccaatgccccagcagcctttatggatttgatgaaccgagtgttcaggccttatttggactcgttcgtgatagtcttcattgatgatattttgatatattcccgcagccgggaggagcacgagcagcatcttagagtggttcttcagaccttgagggatagtcagttatatgctaagttctcgaagtgtgagttctggttgagctcagttgcatttctgggtcatgttgtatcagcagagggtattcaggttgatccaaagaagattgaggcagtcaagaactggcctagaccagcatcagcctagagattcggagtttcttggggttagcaggttactatcgtcggttcgtggaggggttctcatctattgcagccccgatgaccaggttgacccagaagggagcccagttcagatggtcggacgagtgtgaggcgagctttcagaagctcaagacagctctgactacggcaccggtattggttttgcccacaggttcagggccttatacagtctattgtgatgcatctcgtattggacttggtgcagtgttgatgcaggatggcaaggtcattgcctatgcttcgaggcagttgaaggttcatgagaagaactatccagtgcatgatttggagttggcagccattgttcacgcattgaagatttggaggcactatctgtatggcgtggcgtgtgaggtgttcacggatcataagagtcttcagtatttgttcaagcaaaaggagttgaatttgaggcagaggaggtggttggagttgttgaaagattatgacatcactatcctatatcacccgggaaaggccaatgtggtggccgatgccttgagtaggaagtcagccagtatgggcagtcttgcttatattccggtcggtgagagaccgcttgctttggacgttcaggctttggccaatcagttagtgaggttggatatttctgagcctagtagagtattagcttgcacggtcgctcgttcttcgttattggagcgtatccgtgatcggcagtttgatgatccccatttgtgtgtccttagagacacggtacagcgtggaggtgccaagcaggttaccttagatgctgatggagttttgagattgcagggtcgagtttgtgtgcctaatgtggatgggcttcgagagttgattttagaggaggcccatagctcccggtactctattcatccgggcgccgcgaagatgtatcaggacttgcggcagcattattggtggcgtagaatgaagaaggatatcgttgcctatgtggctcggtgtttgaattgtcagcaggttaagtatgagcatcagaggcctggtggtttatttttggagtggaagtgatcactatggacttcgttgttgggctcccgcagactcggaggaagttcgacgcagtttgggtcattgttgataggctgaccaagtcagcgcatttcattcctgtggcagtctcctattcatccgagaggttagctgagatctatatccgggagattgttcgccttcatggtgtgccggtatctatcatttcggaccgaggtacgcagtttacctcgcgtttctggaaagcagtcagcgagagttaggcacccaggttgagttgagtacaacatttcatcctcagacggacgggcagtccgagcggactattcagatattggaggatatgctccgagcttgtgtcattgactttggaggttcgtgggatcagttcttgcctttagcagagtttgcctacaacaacagctaccagtcgagtatccagatggctccttatgaggctttgtatggtaggcgatgtcgatctccggttggatggtttgagccgggagaggctcggttgttgggtacagatttggttcaggaggcttggacaaggtcaggatcattcaggataggcttcgtacagctcagtccaggcaaaagagctatgcagatcgaaaggttcgagatgtggctttcatggttggtgagcgggtattgctccgagtgtcgcctatgaagggcgtgatgagatttgggaagaagggcaagcttagccctaggttcattggtccatttgagattcttgatcgagtgggagaggtggcttatagacttgcattgccaccgagcttatcagccgtacatccagtgtttcatgtgtccatgcttcggaaatatcacggcgatccatcccacgtgttagatttcagcactgtccagttggacaaggacttatcttatgaggaggagccggtagctattctagaccggcaggttcgccagttgaggtcgaagagttttccttcggttcgtgttcagtggagaggtcagcctcctgaggcatcgacctgggagtccgagtccgatatgcgggaccgttatcctcaccttttccccgactcaggtacttccttcttatgtccgttcgaggacgaacggttgttttagaggtggagaatgtgacgacccaaagggtcatcaccggttttctccctttttcgtgcttccgaggccttga

SEQ ID NO: 10 - DNA, 13251 bp, Nicotiana tabacum
tcaaggcctcggaagcacaaaaaagggagaaaaccggtgatgaccctttgggtcgtcacattctccacctctaaaacaaccgttcgtcctcgaacggacataagaaggaagtacctgagtcggggaaaaggtgaggataacggtcccgcatatcggactcggactcccaggtcgatgcctcaggaggctgacctctccactgaacacgaaccgaaggaaaactcttcgacctcaactgcgaacctgccggtctagaatagctaccggctcctcctcataagacaagtccttgtccaactggacagtgctgaaatctaacacgtgggatggatcgccgtgatatttccgaagcatggacacatgaaacactggatgcacggctgataagctcggtggcaatgcaagtctataagccacctctcccactcgatcaagaatctcaaatggaccaatgaacctagggctaagcttgcccttcttcccaaatctcatcacgcccttcataggcgacactcggagcaatacccgctcaccaaccatgaaagccacatctcgaaccttcgatctgcatagctcttttgcctggactgagctgtacgaagcctatcctgaatgatcctgaccttgtccaaggcctcctgaaccaaatctgtacccaacaaccgagcctctcccggctcaaaccatccaaccggagatcgacatcgcctaccatataaagcctcataaggagccatctggatactcgactggtagctgttgttgtaggcaaactctgctaaaggcaagaactgatcccacgaacctccaaagtcaatgacacaagctcggagcatatcctccaatatctgaatagtccgctcggactgcccgtccgtctgaggatgaaatgttgtactcaactcaacctgggtgcctaactctcgctgaactgctctccagaaacgcgaggtaaactgcgtacctcggtccgaaatgatagggcacaccatgaaggcgaacaatctcccggatatagatctcagctaacctctcggatgaataggagactgccacaggaatgaaatgcgctgacttggtcagcctatcaacaatgacccaaactgcgtcgaacttcctccgagtctgcgggagtccaacaacgaagtccatagtgatccgctcccacttccactcgggaagctcaatcctctgaaataaaccaccaggcctctgatgctcatacttaacctgctgacaattcaaacaccgagccacatatgcaacgatatccttcttcattctacgccaccaataatgctgccgcaaatcctgatacatcttcgcggcgcccggatgaatagagtaccgggagctatgggcctcctctaaaatcaactctcgaagcccatccacattaggcacacaaactcgaccctgcaatctcaaaactccatcatcatctaaggtaacctgcttggcacctccacgctgcaccgtgtctctaaggacacacaaatggggatcatcaaactgccgatcacggatacgctccaataacgaagaacgagcgaccgtgcaagctaatactctactaggctcagaaatatccaacctcactaactgattggccaaagcctgaacgtccaaagcaagcggtctctcaccgaccggaatataagcaagactgcccatactggctgacttcctactcaaggcatcggccaccacattggcctttcccgggtgatatagatagtgatgtcataatctttcaacaactccaaccacctcctctgcctcaaattcaactccttttgcttgaacaaatactgaagactcttatgatccgtgaacacctcacatgccacgccatacagatagtgcctccaaatcttcaatgcgtgaacaatggctgccaactccaaatcatgcactggatagttcttctcatgaatcttcaactgcctcgaagcataggcaatgaccttgccatcctgcatcaacactgcaccaagtccaatacgagatgcatcacaatagactgtataaggccctgaacctgtgggcaaaaccaataccggtgccgtagtcagagctgtcttgagcttctgaaagctcgcctcacactcgtccgaccatctgaactgggcacccttctgggtcaacctggtcatcggggctgcaatagatgagaacccctccacgaaccgacgatagtagcctgccaaccccaagaaactccgaatctctgtagctgatgctggtctaggccagttcttgactgcctcaatcttctttggatcaacctgaataccctctgctgatacaacatgacccagaaatgcaactgaactcaaccagaactcacacttcgagaacttagcatataactgactatccctcaaggtctgaagaaccactctaagatgctgctcgtgctcctcccggctgcgggaatatatcaaaatatcatcaatgaagactatcacgaacgagtccaaataaggcctgaacactcggttcatcaaatccataaaggctgctggggcattggtcaacccaaatgacataaccaagaactcataatgcccgtaccgagtgcggaatgctgtcttagggacatcggatgccctaatcctcaactgatggtagccagatctcaagtcaatctttgaaaataccttggcaccctgaagctgatcgaacaaatcatcaatcctcggcagtggatacttattcttaattgtaaccttgttcaattgccggtaatcaatgcacattctcatcgagccatcctttttctttacaaacagaaccggcgcaccccaaggcgatacgctgggtctaatgaaacccttctcaagcaagtcttgcaactgctctttcaactctttcaactctggcggggccatgcgatatggcggaatagaaatgggctgagtgcccggagccaaatcgatgcaaaaatcaatatccctatcgggtggcatccctggcaagtctgatgggaaaacctcaggaaactcacgaaccacgggcacagaatcaatagagggaatctcagcactggaatcacgaacataagccaagtaggccaaacaccccttctcgaccatacgccgagccttcacatacgaaataacactgcgggtagaatgaccaggagtccctctccactctaaacggggcaaatccggtaaggctaaagtcacagtcttggcatgacaatccaagatcgcatgatacggggacaaccaatccatccctaatataacgtcgaaatccaccatatctaagagcaacaaatcaacacgggtctcaagtcccctaaacaccacaacacaggaacgatgaacccgatcaaccactatagaatcacccactggtgtagatacatacacaggaatactcaaggcctcactaggcataaccaggtagggtgcaaaataggacgacacatatgaatacgtagatccagggtcaaatagcactgaagcatctctatcacagaccaaaatagtacctgtaataacagcatcggatgactcagcctctggcctggctggcaaagcataacatcggggctgggccccacctccctgaatcacatccctgggacgatcggctgctggctgacccctacctctggcggtctgagctccacctctatgacctctacctccacctctatgtcctctacccccgcctctagctggctgggcaggctgtggagcaactggtgcctgaatcataggacgaggaccctgctgctgagaactacccgaagctcgagggcaaaacctggcaatgtgacccatatcaccacaagtgtaacaagccctcggctgctgagactgctgaccctgtcgccctgaatgaccacctcggaaactctgaagcggcggtgcactgatgggagctggtggtgcactgaaggactgctgatccaaataatgcgtctgagaaccacgaccacctgagataccatgtgatacctggagagctgactgaaagggcctaggaggatggcctctaccatacgaatctctacctccagacgaggtaccactgaatctgcctgaatgacggggcctcttatccgacccatgaccacctccctgtgacagaaccatctcaactctgcgggccacattggccgcctcctgaaatgtgatctcgctcccggcctccttggccatctgaagacgaatcggcagaataagaccatcaataaaccttctcaccctctctctctcggtgggaagtatgatgagagcatggcgagctaaatcgatgaacctggtctcatactgggtaacagtcatagaaccctgctggaggcgctcaaactgcctccgataggcctctctctgagtaacggggagaaacttctctagaaacaacactgtaaactgctcccaagtcaaagatggcgatccggctggtctcgctaagcaataatccctccaccaagtcttggcggatccagacaagcgaaatgtagcaaaatcaaccccattggtctcaacaatacccatgtttctgagaacctcgtggcagctgtctagataatcctggggatcctcagtagatgcaccgcaaaagtagaagtgaagagcttggtgaacctatccaatctccacaaagcatcggcggacatagccgctccatcgccggtctgagctatacccggctgaacccactgctggctgaaccaccggaacctgaacctggggagctacctgctccggagtgtacgtgtagcaggagtctgacccctcctccagcctgagaagtggctggtgctactggaagcaaacccgctcgtgacgctctccatgaaggcctaccaatcggaccaaagcgtcctgaagaactggagtggcaatgaaaccctctgggacctgagctgggcccaccggagctgctggagctggaacctcctcatcataatcaacatgaggctccacctctggaactgctgctcggggctgagctctgcccctgcctcggcctctgggcctcgcctcgccctctgcccctaataggagctgctgctgggggctcgggctgctgcgcggtcgatgaggaagcgcgtgtcctcgccatctgcgaaagaacggagtagaaattcaatcagtattggggaaacagaaccgcacgacaagaaagaacagatgtgaagttttcctaactcagtagcctctgcgggataaatacagacgtctccgtaccgatccctcagactctaccgagcttgtccgtgagttgtgagacctaagtaacctagtgctctgataccaacttgtcacgacccggatttcccaccatcgggagtcgtgatggcgcctactattggagctaggccagccaagtattaaaacatttctgataacattcgcaacaatataacaaaacgagacaattaaataaaagcggaagtcttaacttatataaaactgaatagaaatgcggaaagtttaacataatcctctacccaagattggtgtcacaatgctcacgaacttctaagatttactaaatacaatcgtctgaaagaaaattataaactgtttgtttcggtacaaaagataacaaactgaataaagagagagagactccgggcctgcggacgtcagcaaggctacctcggtgtctctggactgaagtcagctcccgatcaaatcctactgctgaggtccgcgtaaagcacgaaaggtgattccatgtattgttttggtgaggacgagagtaaaagcacgaagggtgatgctgtgcaaattgttgactttttattcttcttgacattctggctttgttacttctttctgttattgaggatttctatttgaaacttttagctccccatagcatgctccccccttcttagctgtttaaattctgtatatttccttttattgcatatatctgcataggttgtttttggtaggtcctgtctagcctcgtcactacttcgcctgggttaggccaggcacttaccagcacatggggtcggttgtgctgatgctacactctgtgcatctttttgcacagatctaggagcagctttttcttcctcacccaaacaacaatcacaaggcaaatagggtaaggaaatctataacctcgaagtaaatcaaataagaacaagtaatgaaagaaacaacataactcggatatcaacaaagaatcagaaagcaacaaatacacggcatcacccttcgtgcttttactctcgtcctcaccaaagcaatcatataaatgaaatatgcacggcatcacccttcgtgcttttactctctttcctcaccatataatcaataaaatcggcacggaatggtacatcgtgcggcacgacatcacccttcgtgctttacactctttcctcacaatagcaaacaatgcacggcatcacccttcgtgctttatcactcttcctcacccaagcaacaatcacaaacaaggggcaagggagtagacaaataatgatagaaatcccggcaagggaatacaaataaacagctaactcccggcaagggagcacaattaagcagttaaaaacccggcaagggaacaatatcaataatctcagcatcccggcaagggagatagtcaacaaagcaacaagcatcccggcaagggagcaattcaataattctttctctttctttcacttttacctcttatctcactttaccacctgagccaacgctccaaaggggttcaatcatttcatatactttcacgctttatgatatactcgagccaatgctccaagaatgtacaaatcataattcttcctcaaactcttcacattatatgaaatttatcaatttaacaaggaagaggtatcacaaaatccgaataaacacaaataagactcacggtcatgctagactccggtgtatagatactcgtcaccatgcctatacaccgtactcaacaattagcaaatagcaaacaacactctaatcctattccctcaagccaaagttagaacaaacacttacctcggtccaaagaatagcaatcaaccctcaaataccgcctttcctttataatccgactccgaaacaacgatatctaggcataattaattcaataatatcaataaagactcgataacaaaatcccatagcttagatatgaagttcctagcattcttccaaaaataccaaaattcgaccccgggcccacatggtccaaacacgaggttcggaccaaaaccatatcacccattcatccacgagcccgaatatataattttttcaaattcgaccccaaaacgaggtccaaatcaagaaaaagtaaaaagccctaactctacccactcccccaatttctaccctaaattacatgttttaggccaagaaattcaatagatgttgatgaaaatggaagagaataagttaaagattactaacccaagagtttatggtgaaagaatgcttcaaagatcgccctagaactttggagaagaaagagtttgtgaaattttgtaagaatcccgtaaggctactgttctggattttaaaatttaactgggcgaatttggcctatgcgatcgcggacaaaggagtgcgatcgcatagagtaaatgggacagggctctgcgatcgcgaatgacactatgcgatcgcataaaggaaatagtgaaggctggctaacacactgcgatcgcagaggaaataatgcgatcgcgtagagcaaaatataggacctctcaggctaactactaactatgcgatcgcatagaacaaactaaaaccctgaaaatttacactatgcgatcgcggacatagctatgcgatcgcatagcacaaaagactggacaccagcagacagcagttctgcaatttttctaagtctaaaaccattccgaaacaaacacccgagccctcggggctcctaaccaaacacatgcactaactcaacaacatcatacgaacttatccgtgcgatcaaatcgcctaaataacttcaaaaacaatgaatcaaacctcaaaatcaagagtttttctcaaacttcatcaagtttcaaatttaggaattcaagtccgaatcacgtcaaacgacgtccgatttcaaccaaatttcacagaaagcgcttaaaccacatataagacctgtaccgggcgccggaaccaaaatacgggcccgataccaatgctttctaattcatttttatttcaaattttcatattaaatttcagaaaacaatttcttttaaaaattcatttctcgggctcgggacctcggatttcgattccgggcatacgcccgagtcccatatttttctacggaccctccgggaccgtcaaatcacgggtccgggtccgtttacccaaaatgttgaccaaagtcaactttaaccattttaaagccacaatttatcaaatttcacataatttaacacataagcttttccggctacgcgcccggactgcgcacgcaaatcgaggcaactaaaggtgaggttttcaaggcctcggaagcacgaaaaagggagaaaaccggtgatgaccctttgggtcgtcacattctccacctctaaaacaaccgttcgtcctcgaacggacataagaaggaagtacctgagtcggggaaaaggtgaggataacggtcccgcatatcggactcggactcccaggtcgatgcctcaggaggctgacctctccactgaacacgaaccgaaggaaaactcttcgacctcaactggcgaacctgccggtctagaatagctaccggctcctcctcataagataagtccttgtccaactggacagtgctgaaatctaacacgtgggatggatcgccgtgatatttccgaagcatggacacatgaaacactggatgtacggctgataagctcggtggcaatgcaagtctataagccacctctcccactcgatcaagaatctcaaatggaccaatgaacctagggctaagcttgcccttcttcccaaatctcatcacgcccttcataggcgacactcggagcaatacccgctcaccaaccatgaaagccacatctcgaacctttcgatctgcatagctcttttgcctggactgagctgtacgaagcctatcctgaatgatcctgaccttgtccaagcctcctgaaccaaatctgtacccaacaaccgagcctctcccggctcaaaccatccaaccggagatcgacatcgcctaccatacaaagcctcataaggagccatctggatactcgactggtagctgttgttgtaggcaaactctgctaaaggcaagaactgatcccacgaacctccaaagtcaatgacacaagctcggagcatatcctccaatatctgaatagtccgctcggactgcccgtccgtctgaggatgaaatgttgtactcaactcaacctgggtgcctaactctcgctgactgctttccagaaacgcgaggtaaactgcgtacctcggtccgaaatgatagataccggcacaccatgaaggcgaacaatctcccggatatagatctcagctaacctctcggatgaataggagactgccacaggaatgaaatgcgctgacttggtcagcctatcaacaatgacccaaactgcgtcgaacttcctccgagtctgcgggagcccaacaacgaagtccatagtgatcacttccactccaaaaataaaccaccaggcctctgatgctcatacttaacctgctgacaattcaaacaccgagccacataggcaacgatatccttcttcattctacgccaccaataatgctgccgcaagtcctgatacatcttcgcggcgcccggatgaatagagtaccgggagctatgggcctcctctaaaatcaactctcgaagcccatccacattaggcacacaaactcgaccctgcaatctcaaaactccatcagcatctaaggtaacctgcttggcacctccacgctgtaccgtgtctctaaggacacacaaatggggatcatcaaactgccgatcacggatacgctccaataacgaagaacgagcgaccgtgcaagctaatactctactaggctcagaaatatccaacctcactaactgattggccaaagcctgaacgtccaaagcaagcggtctctcaccgaccggaatataagcaagactgcccatactggctgacttcctactcaaggcatcggccaccacattggcctttcccgggtgatataggatagtgatgtcataatctttcaacaactccaaccacctcctctgcctcaaattcaactccttttgcttgaacaaatactgaagactcttatgatccgtgaacacctcacacgccacgccatacagatagtgcctccaaatcttcaatgcgtgaacaatggctgccaactccaaatcatgcactggatagttcttctcatgaaccttcaactgcctcgaagcataggcaatgaccttgccatcctgcatcaacactgcaccaagtccaatacgagatgcatcacaatagactgtataaggccctgaacctgtgggcaaaaccaataccggtgccgtagtcagagctgtcttgagcttctgaaagctcgcctcacactcgtccgaccatctgaactgggctcccttctgggtcaacctggtcatcggggctgcaatagatgagaacccctccacgaaccgacgatagtaacctgctaaccccaagaaactccgaatctctaggctgatgctggtctaggccagttcttgactgcctcaatcttctttggatcaacctgaataccctctgctgatacaacatgacccagaaatgcaactgagctcaaccagaactcacacttcgagaacttagcatataactgactatccctcaaggtctgaagaaccactctaagatgctgctcgtgctcctcccggctgcgggaatatatcaaaatatcatcaatgaagactatcacgaacgagtccaaataaggcctgaacactcggttcatcaaatccataaaggctgctggggcattggtcaacccaaatgacataaccaagaactcataatgcccgtaccgagtgcggaatgctgtcttagggacatcggatgccctaatcctcaactgatggtagccagatctcaagtcaatctttgaaaataccttggcaccctgaagctgatcgaacaaatcatcaatcctcggcagtggatacttattcttaattgtaaccttgttcaattgccggtaatcaatgcacattctcatcgagccatcctttttctttacaaacagaaccggcgcaccccaaggcgatacgctgggtctaatgaaacccttctcaagcaagtcttgcaactgctctttcaactctttcaactctggcggggccatgcgatatggcggaatagaaatgggctgagtgcccggagccaaatcgatgcaaaaatcaatatccctatcgggtggcatccctggcaagtctgatgggaaaacctcaggaaactcacgaaccacgggcacagaatcaatagagggaatctcagcactggaatcacgaacataagccaagtaggccaaacaccccttctcgaccatacgccttcacatagaaataacaggggagtctccctctccactctaaggggcaaatccggtaaggctaaagtcacagtcttggcatgacaatccaagatcgcatgatacggggacaaccaatccatccctaatataacgtcgaaatccaccatatctaagagcaacaaatcaacacgggtctcaagtcccctaaacaccacaacacaggaacgatgaacccgatcaaccactatagaatcacccactggtgtagatacatacacaggaatactcaaggcctcactaggcataaccaggtagggtgcaaaataggacgacacatatgaatacgtagatccagggtcaaatagcactgaagcatctctatcacagaccaaaatagtacctgtaataacaacatcggatgactcagcctctggcctggctggcaaagcataacatcggggctgggccccacctccctgaatcacatccctgggacgatcggctgctggctgacccctacctctggcggtctgagctccacctctatgacctctacctccacctctatgtcctctacccccgcctctagctggctgggcaggctgtggagcaactggtgcctgaatcataggacgaggaccctgctgctgagaactacccgaagctcgagggcaaaacctggcaatgtgacccatatcaccacaagtgtaacaagccctcggctgctgagactgctgaccctgtcgcctgaatgaccacctcggaaactctgaagcggcggtgcactgatgggagctggtggtgcactgaaggactgctgatccaaataatgcgtctgagaaccacgaccacctgagataccatgtgatacctggagagctgactgaaagggcctaggaggatggcctctaccatacgaatctctacctccagacgaggtaccactgaatctgcctgaatgacggggcctcttatccgacccatgaccacctccctgtgacagaaccatctcaactctgcgggccacattggccgcctcctgaaatgtgatctcgctcccggcctccttggccatctgaagacgaatcggcagaataagaccatcaataaaccttctcaccctctctctctcggtgggaagtatgatgagagcatggcgagctaaatcgatgaacctggtctcatactgggtaacagtcatagaaccctgctggaggcgctcaaactgcctccgataggcctctctctgagtaacggggagaaacttctctagaaacaacactgtaaactgctcccaagtcaaagatggcgatccggctggtctcgctaagcaataatccctccaccaagtcttggcggatccagacaagcgaaatgtagcaaaatcaaccccattggtctcaacaatacccatgtttctgagaacctcgtggcagctgtctagataatcctggggatcctcagtagatgcaccggcaaaagtagaagtgaagagcttggtgaacctatccagtctccacaaagcatcggcggacatagccgctccatcgccggtctgagctatggcacccggctgaactaccccaactggctgaaccgctggagtctgaatctggggagctacctgctccggagtgcgtgtagcaggagtctgagcccctcctccagcctgagaagtggctggtgctacaggaagcaaacctgttcgggtgactctctccat

SEQ ID NO: 11 - DNA, 3518 bp, Nicotiana tabacum
atggcgaggacacgcgcttccttatcgaccgagcagcagcccgagcccccagcagcagctcctattaggggcagagggcgaggccatgctagaggccgaggtaggggcagagctcagccccgagcagcagttccagaggtggagcctcatgttgattatgatgaggaggttccagctccagtaactttggtgggcctaactcaggtcccagagggttttattgccaccctagttcttcaggacgccctggttcaattggtgggccttatggagagagtcacccgaatatgttttcttcctgtagcaccagccacttctctggctggaggaggggctcagactccttctacacgcactccggagtaggtagctccccagattcagattccagcggtttagctagttagggtagttcagccgggtgccatagctcagaccggcgatggagcggctatgttcgtcgatgctttgtggagactggataggttcaccaagctcttcacttctacttttgccggtgcatttactgaggatccccaggattatctagaaagcttccacgaggttctgagaaacatgggtattattgagaccaatggggttgattttgctacatttcgcttgtctggatccgccaagacttggtggagggattattgcttagcgagaccagccggatctccatctttgacttgggagcagtttacagtgttgtttctagagaagtttctccccgttacttagagagaggcctatcggaggcactttgagcgcctccagtagggttctatgactgttacccagtatgagaccaggttcaacgatttagctcgccatgctctcatcatacttcccaccgagagagagagggtgagaaggtttattgatggtcttattctgccaattcgtcttcagatggccaaggagggcgggagcgagatcacatttcaggaggcggtcaatgtggcccgcatagttgagatggttatgtcatatggaggtggtcataggtcggataagaggccccgtcattcaggaagattctgtggtattgcgtctggaggtagagattcgtatggtagaggccatcctcctaggctcgttcagtcagctcaccaggtatcacatggtatctcaggtggtcgtggttctcagatgcattatttggatcagtagtctttcagtgcaccaccatctcccatcagtgcaccgccacttcagaatttctgaggtggtcattcagggcaatagggtcagcagtctcagcagccgagggcttgttacacttgtggtgatatgggtcacatttctaagttttacccttgagcttcgggtagttctcaacaacagggtcctcgccttatgattcaggcaccagttgctccatagcctgcccagccagctagaggcgggggtagaggacatagaggtggaggtagaggtcatagaggtggagctcagaccgccagaggtaggggtcagccagcagccgatcgtcccagggttgtgatttagggaggtagggcccaaccccgatgttatgctttgctagccaggccagaggctaagtcatccgatgctgttattacaggtactattttggtctgtgatagagatgcttcagtgctatttgaccctggatctacgtattcacatgtgtcgtcctattttgcaccctacttggttatacgtagtgaggccttgagtattcctgtgtatgtatctacactagtaggtgattctatagtggttgattgggttcatcgttcctgtgttgtggtgtttaggggacttgagacccgtgttgatttgttgctcttagatatggtggattttgacattatattagggatggattggttgtccccgtatcatgcgatcttggattgtcatgccaagattgtgactttagccttatcggattttccccatttagagtggagagggactcctggtcattctacccgtagtgttatttcgtatgtgaaggctcggtgtatggtcgagaaggggtgtttggcctactcagcttatgttcgtgattccagtgctgagattccctctattgattctgtgaccttggttcgtgaatttcctgtggttttcccatcagacttgccaaggatgccacccgatagggatattgatttttgcatcgatttggctccgggcactcagcccatttctattccaccatatcacatgtccctgctagagttgaaagagttgaaagagcagttgcaagacttgcttgagaagggtttcattagacccagcatatcgccttggggtgcgccgactttgtttgtaaagaaaaaggatggctcgatgagaatgtgcattgattaccggcaattgaacaaggttacaattaagaataagtatccactaccgaggattgataatttgttcgatcagcttcagggtgccaaggtattttcaaagattgacttgagatgtggctaccatcagttgaggactagggcatccgatgtccctaagacagcattccgcactcggtacgggcattataagttcttggttatgtcatttgggttgaccaatgcccctgcagcctttatggatttgatgaaccgagtgttcaggacttatttggactcgttcgtgatagtcttcattgatgatattttgatatattcccgcagccgggaggagcacgagcaacatcttagattggttcttcagaccttgaggtatagtcagttatatgctaagttctcgaagtgtgagttctggttgagctcggttgcatttctgggtcacgttgtatcagcagagggtattcaggtgggcccgaagaagatagaggtagtcaagaattagcctcgaccagctttaactacagagattcagagtttcttggggttagaaggttactaccgtcggtttgtggaggggttttcatccattgcagccccgatgaccaggttgacccagaagggagcccagttcagatggccggacgagtgtgaggcgaactttcagaagctcaagaccgctctgactacgacaccggtattggttttgcccgcaggctcagggccttatacagtctattatgatgcatctcgtattggacttgatgcagtgttgatgtaggatggcaaggtcattgcctatgcttcgaggcagttgaaggttcatgagaagaactatcctgtgcatgatttggagttggcagccattgttcacgcattgaagatttggaggcactatctgtatggcgtggcgtgtgaggtgttcacggatcataagcgtctttagtatttgttcaagcaaaaggagttgaatttgaggcagaggaggtggttgaagttgttgaaagattatgacatcactatcctatatcacccgggaaagtccaatgtggtggccgataccttgagtaggaagtcagccagtatggtcagtcttgcttatattccggtcggcgagagacctcttgctttggacgttcaggatttggccaatcagttaatgaggttggatatttctga

SEQ ID NO: 12 - DNA, 11658 bp, Nicotiana tabacum
tcacaactgattggccaaagcctgaacgtccaaagcaagcggtctctcaccgaccggaatataagcaagactgcccatactggctgacttcctactcaaggcatcggccaccacattggcctttcccgggtgatataggatagtgatgtcataatctttcaacaactccaaccacctcctctgcctcaaattcaactccttttgcttgaacaaatactgaagactcttatgatccgtgaacacctcacacgccacgccatacagatagtgcctccaaatcttcaatgcgtgaacaatggctgccaactccaaatcatgcactggatagttcttctcatgaaccttcaactgcctcgaagcataggcaatgaccttgccatcctgcatcaacactgcaccaagtccaatacgagatgcatcacaatagactgtataaggccctgaacctgtgggcaaaaccaataccggtgccgtagtcagagctgtcttgagcttctgaaagctcgcctcacactcgtccgaccatctgaactgggcacccttctgggtcaacctggtcatcggggctgcaatagatgagaacccctccacgaaccgacgatagtaacctgctaaccccaagaaactccgaatctctgtagctgatgctggtctaggccagttcttgactgcctcaatcttcttcggatcaacctgaataccctctgctgatacaacatgacccagaaatgcaactgagctcaaccagaactcacacttcgagaacttagcatataactgactatccctcaaggtctgaagaaccactctaagatgctgctcgtgctcctcccggctgcgggaatatatcaaaatatcatcaatgaagactatcacgaacgagtccaaataaggcctgaacactcggttcatcaaatccataaaggctgtggggcattggtcaacccaaatgacataaccaagaactcataatgcccgtaccgagtgcggaatgctgtcttagggacatcggatgccctaatcctcaactgatggtagccagatctcaagtcaatctttgaaaataccttggcaccctgaagctgatcgaacaaatcatcaatcctcggcagtggatacttattcttaattgtaaccttgttcaattgccggtaatcaatgcacattctcatcgagccatcctttttctttacaaacagaaccggcgcaccccaaggcgatacgctgggtctaatgaaacccttctcaagcaagtcttgcaactgctctttcaactctttcaactctggcggggccatgcgatatggcggaatagaaatgggctgagtgcccggagccaaatcgatgcaaaaatcaatatccctatcgggtggcatccctggcaagtctgatgggaaaacctcaggaaactcacgaaccacgggcacagaatcaatagagggaatctcagcactggaatcacgaacataagccaagtaggccaaacaccccttctcgaccatacgccgagccttcacatacgaaataacactgcgggtagaatgaccaggagtccctctccactctaaacggggcaaatccggtaaggctaaagtcacagtcttggcatgacaatccaagatcgcatgatacggggacaaccaatccatccctaatataacgtcgaaatccaccatatctaagagcaacaaatcaacacgggtctcaagtcccctaaacaccacaacacaggaacgatgaacccgatcaaccactatagaatcacccactggtgtagatacatacacaggaatactcaaggcctcactaggcataaccaggtagggtgcaaaataggacgacacatatgaatacgtagatccagggtcaaatagcactgaagcatctctatcacagaccaaaatagtacctgtaataacagcatcggatgactcagcctctggcctggctggcaaagcataacatcggggctgggccccacctccctgaatcacatccctgggacgatcggctgctggctgacccctacctctggcggtctgagctccacctctatgacctctacctccacctctatgtcctctacccccgcctctagctggctgggcaggctgtggagcaactggtgcctgaatcataggacgaggaccctgctgctgagaactacccgaagctcgagggcaaaacctggcaatgtgacccatatcaccacaagtgtaacaagccctcggctgctgagactgctgaccctgtcgccctgaatgaccacctcggaaactctgaagcggcggtgcactgatgggagctggtggtgcactgaaggactgctgatccaaataatgcgtctgagaaccacgaccacctgagataccatgtgatacctggagagctgactgaaagggcctaggaggatggcctctaccatacgaatctctacctccagacgaggtaccactgaatctgcctgaatgacggggcctcttatccgacccatgaccacctccctgtgacagaaccatctcaactctgcgggccacattggccgcctcctgaaatgtgatctcgctcccggcctccttggccatctgaagacgaatcggcagaataagaccatcaataaaccttctcaccctctctctctcggtgggaagtatgatgagagcatggcgagctaaatcgatgaacctggtctcatactgggtaacagtcatagaaccctgctggaggcgctcaaactgcctccgataggcctctctctgagtaacggggagaaacttctctagaaacaacactgtaaactgctcccaagtcaaagatggcgatccggctggtctcgctaagcaataatccctccaccaagtcttggcggatccagacaagcgaaatgtagcaaaatcaaccccattggtctcaacaatacccatgtttctgagaacctcgtggcagctgtctagataatcctggggatcctcagtagatgcaccggcaaaagtagaagtgaagagcttggtgaacctatccagtctccacaaagcatcggcggacatagccgctccatcgccggtctgagctatggcacccggctgaactacccaactggctgaaccgctggagtctgaatctggggagctacctgctccggagtgcgtgtagcaggagtctgagcccctcctccagcctgagaagtggctggtgctacaggaagcaaacctgttcgggtgactctctccataaggcccaccaatcgaaccagggcgtcctgaagaactggggtggcaatgaaaccctctgggacctgagctgggcccaccggagctgctggagctggaacctcctcatcataatcaacatgaggctccacctctggaactgctgctcggggctgagctctgcccctgcctcggcctctgggcctcggcctcgccctctgcccctaataggagctgctgctgggggctcgggctgctgcgcggtcgatgaggaagcgcgtgtcctcgccatctgcgaaagaacggagtagaaattcaatcagtattggggaaacagaaccgcacgacaagaaagaacagatgtgaagttttcctaactcagtagcctctgcgggataaatacagacgtctccgtaccgatccctcagactctaccgagcttgtccgtgagttgtgagacctaagtaacctagtgctctgataccaacttgtcacgacccggatttcccaccatcgggagtcgtgatggcgcctactattggagctaggccagccaagtattaaaacatttctgataacattcgcaacaatataaacaaaacgagacaattaaataaaagcggaagtcttaacttactagaaaactgaataaatgcggaaagtttaacataatcctctacccaagattggtgtcacaatgctcacgaacttctaagatttactaaatacaatcgtctgaaagaaaattataaactgtttgtttcggtacaaaagataacaaactgaataaagagagagagagactccgggcctgcggacgtcagcaaggctacctcggtgtctctggactgaagtcagctcccgatcaaatcctactgctgaggtccaaaagctgctcctggatctgtgcaaaaagatgcacagagtgtagcatcagcacaaccgaccccatgtgctggtaagtgcctggcctaaccccggcgaagtagtgacgaggctagacaggacctaccaaaaacaacctgtgcagatatatgcaataaaaggaaatatacagaatttaaacagctaagaggggggagcatgctatggggagctaacagtttcaaatagaaatcctcaataacagaaagaagtaacaaagccagaatgtcaacaagaatcaaaaatcaacaatttgcacggcatcacccttcgtgcttttactctcgtcctcaccaaaacaatacacggcatcacccttcgtgctttacgctcttcctcacccaaacaacaatcacaaggcaaatagggtaaggaaatctataacctcgaagtaaatcaaataagaacaagtaatgaaagaaacaacataactcggatatcaacaaagaatcagaaagcaacaaatgcacggcatcacccttcgtgcttttactctcgtcctcaccaaagcaatcatataaataaaatatgcacgacacccttcgtgcttttactctctttcctcaccatataatcaataaaatcggcacggaatggtacatcgtgcggcacacatcacccttcgtgctttacactctttcctcacaatagcaaacaatgcacgacatcacccttcgtgctttatcactcttcctcacccaagcaacaatcacaaacaaggggcaagggagtagacaaataatgatagaaatcccggcaagggaatacaaataaacagctaactcccggcaagggagcacaattaagcagttaaaaacccggcaagggaacaatatcaataatctcagcatcccggcaagggagatagtcaacaaagcaacaagcatcccggcaagggagcaattcaataattctttctctttctttcacttttacctcttatctcactttaccacctgagccaacgctccaaaggggttcaatcatttcatatactttcacgctttatgatatactcgagccaatgctccaagaatgtacaaatcataattcttcctcaaactcttcacattatatgaaatttatcaatttaacaaggaagaggtatcacaaaatccgaataaactgaattataaaggaaaggcggtatttgagggttgattgctattctttggaccgatgtaagtgtttgttctaactttgacttgagggaataggattaaagtgttgtttgctatttgctaattgttgagtacggtgtataggcatggtgacgagtatctatacaccgaagtctagcatgaccgtgagtcttattccgactccgaaacaacgatatctaggcataattaattcaataatatcaataaagactcgataacaaaatcccatagcttagatatgaagttcctagcattcttccaaaaataccaaaattcgaccccgggcccacatggtccaaacacgaggttcggaccaaaaccatatcacccattcatccacgagcccgaatatataattttttcaaattcgaccccaaaacgaggtccaaatcaagaaaaagtaaaaagccctaactctacccactcccccaatttctaccctaaattacatgttttaggccaagaaattcaatagatgttgatgaaaatggaagagaataagttaaagattactaacccaagagtttatggtgaaagaatgcttcaaagatcgccctagaactttggagaagaaagagtttgtgaaattttgtaagaatcccgtaaggctactgttctggattttaaaatttaactgggcgaatttggcctatgcgatcgcggacaaaggagtgcgatcgcatagagtaaatgggacagggctctgcgatcgcgaatgacactatgcgatcgcataaaggaaatagtgaaggctggctaacacactgcgatcgcagaggaaataatgcgatcgcgtagagcaaaatataggacctctcaggctaactactaactatgcgatcgcatagaacaaactaaaaccctgaaaatttacactatgcgatcgcggacatagctatgcgatcgcatagcacaaaagactggacaccagcagacagcagttctgcaatttttctaagtctaaaaccattccgaaacaaacacccgagccctcggggctcctaaccaaacacatgcactaactcaacaacatcatacgaacttatccgtgcgatcaaatcgcctaaataacttcaaaaacaatgaatcaaacctcaaaatcaagagtttttctcaaacttcatcaagtttcaaatttaggaattcaagtccgaatcacgtcaaacgacgtccgatttcaaccaaatttcacagaaagcgcttaaaccacatataagacctgtaccgggcgccggaaccaaaatacgggcccgataccaatgctttctaattcatttttatttcaaattttcatattaaatttcagaaaacaatttcttttaaaaattcatttctcgggctcgggacctcggatttcgattccgggcatacgcccgagtcccatatttttctacggaccctccgggaccgtcaaatcacgggtccgggtccgtttacccaaaatgttgaccaaagtcaactttaaccattttaaagccacaatttatcaaatttcacataatttaacacataagcttttccggctacgcgcccggactgcgcacgcaaatcgaggcaactaaaggtgaggttttcaaggcctcggaagcacgaaaaagggagaaaaccggtgatgaccctttgggtcgtcacattctccacctctaaaacaaccgttcgtcctcgaacggacataagaaggaagtacctgagtcggggaaaaggtgaggataacggtcccgcatatcggactcggactcccaggtcgatgcctcaggaggctgacctctccactgaacacgaaccgaaggaaaactcttcgacctcaactggcgaacctgccggtctagaatagctaccggctcctcctcataagataagtccttgtccaactggacagtgctgaaatctaacacgtgggatggatcgccgtgatatttccgaagcatggacacatgaaacactggatgtacggctgataagctcggtggcaatgcaagtctataagccacctctcccactcgatcaagaatctcaaatggaccaatgaacctagggctaagcttgcccttcttcccaaatctcatcacgcccttcataggcgacactcggagcaatacccgctcaccaaccatgaaagccacatctcgaacctttcgatctgcatagctcttttgcctggactgagctgtacgaagcctatcctgaatgatcctgaccttgtccaagcctcctgaaccaaatctgtacccaacaaccgagcctctcccggctcaaaccatccaaccggagatcgacatcgcctaccatacaaagcctcataaggagccatctggatactcgactggtagctgttgttgtaggcaaactctgctaaaggcaagaactgatcccacgaacctccaaagtcaatgacacaagctcggagcatatcctccaatatctgaatagtccgctcggactgcccgtccgtctgaggatgaaatgttgtactcaactcaacctgggtgcctaactctcgctgactgctttccagaaacgcgaggtaaactgcgtacctcggtccgaaatgatagataccggcacaccatgaaggcgaacaatctcccggatatagatctcagctaacctctcggatgaataggagactgccacaggaatgaaatgcgctgacttggtcagcctatcaacaatgacccaaactgcgtcgaacttcctccgagtctgcgggagcccaacaacgaagtccatagtgatcacttccactccaaaaataaaccaccaggcctctgatgctcatacttaacctgctgacaattcaaacaccgagccacataggcaacgatatccttcttcattctacgccaccaataatgctgccgcaagtcctgatacatcttcgcggcgcccggatgaatagagtaccgggagctatgggcctcctctaaaatcaactctcgaagcccatccacattaggcacacaaactcgaccctgcaatctcaaaactccatcagcatctaaggtaacctgcttggcacctccacgctgtaccgtgtctctaaggacacacaaatggggatcatcaaactgccgatcacggatacgctccaataacgaagaacgagcgaccgtgcaagctaatactctactaggctcagaaatatccaacctcactaactgattggccaaagcctgaacgtccaaagcaagcggtctctcaccgaccggaatataagcaagactgcccatactggctgacttcctactcaaggcatcggccaccacattggcctttcccgggtgatataggatagtgatgtcataatctttcaacaactccaaccacctcctctgcctcaaattcaactccttttgcttgaacaaatactgaagactcttatgatccgtgaacacctcacacgccacgccatacagatagtgcctccaaatcttcaatgcgtgaacaatggctgccaactccaaatcatgcactggatagttcttctcatgaaccttcaactgcctcgaagcataggcaatgaccttgccatcctgcatcaacactgcaccaagtccaatacgagatgcatcacaatagactgtataaggccctgaacctgtgggcaaaaccaataccggtgccgtagtcagagctgtcttgagcttctgaaagctcgcctcacactcgtccgaccatctgaactgggctcccttctgggtcaacctggtcatcggggctgcaatagatgagaacccctccacgaaccgacgatagtaacctgctaaccccaagaaactccgaatctctaggctgatgctggtctaggccagttcttgactgcctcaatcttctttggatcaacctgaataccctctgctgatacaacatgacccagaaatgcaactgagctcaaccagaactcacacttcgagaacttagcatataactgactatccctcaaggtctgaagaaccactctaagatgctgctcgtgctcctcccggctgcgggaatatatcaaaatatcatcaatgaagactatcacgaacgagtccaaataaggcctgaacactcggttcatcaaatccataaaggctgctggggcattggtcaacccaaatgacataaccaagaactcataatgcccgtaccgagtgcggaatgctgtcttagggacatcggatgccctaatcctcaactgatggtagccagatctcaagtcaatctttgaaaataccttggcaccctgaagctgatcgaacaaatcatcaatcctcggcagtggatacttattcttaattgtaaccttgttcaattgccggtaatcaatgcacattctcatcgagccatcctttttctttacaaacagaaccggcgcaccccaaggcgatacgctgggtctaatgaaacccttctcaagcaagtcttgcaactgctctttcaactctttcaactctggcggggccatgcgatatggcggaatagaaatgggctgagtgcccggagccaaatcgatgcaaaaatcaatatccctatcgggtggcatccctggcaagtctgatgggaaaacctcaggaaactcacgaaccacgggcacagaatcaatagagggaatctcagcactggaatcacgaacataagccaagtaggccaaacaccccttctcgaccatacgccttcacatagaaataacaggggagtctccctctccactctaaggggcaaatccggtaaggctaaagtcacagtcttggcatgacaatccaagatcgcatgatacggggacaaccaatccatccctaatataacgtcgaaatccaccatatctaagagcaacaaatcaacacgggtctcaagtcccctaaacaccacaacacaggaacgatgaacccgatcaaccactatagaatcacccactggtgtagatacatacacaggaatactcaaggcctcactaggcataaccaggtagggtgcaaaataggacgacacatatgaatacgtagatccagggtcaaatagcactgaagcatctctatcacagaccaaaatagtacctgtaataacaacatcggatgactcagcctctggcctggctggcaaagcataacatcggggctgggccccacctccctgaatcacatccctgggacgatcggctgctggctgacccctacctctggcggtctgagctccacctctatgacctctacctccacctctatgtcctctacccccgcctctagctggctgggcaggctgtggagcaactggtgcctgaatcataggacgaggaccctgctgctgagaactacccgaagctcgagggcaaaacctggcaatgtgacccatatcaccacaagtgtaacaagccctcggctgctgagactgctgaccctgtcgcctgaatgaccacctcggaaactctgaagcggcggtgcactgatgggagctggtggtgcactgaaggactgctgatccaaataatgcgtctgagaaccacgaccacctgagataccatgtgatacctggagagctgactgaaagggcctaggaggatggcctctaccatacgaatctctacctccagacgaggtaccactgaatctgcctgaatgacggggcctcttatccgacccatgaccacctccctgtgacagaaccatctcaactctgcgggccacattggccgcctcctgaaatgtgatctcgctcccggcctccttggccatctgaagacgaatcggcagaataagaccatcaataaaccttctcaccctctctctctcggtgggaagtatgatgagagcatggcgagctaaatcgatgaacctggtctcatactgggtaacagtcatagaaccctgctggaggcgctcaaactgcctccgataggcctctctctgagtaacggggagaaacttctctagaaacaacactgtaaactgctcccaagtcaaagatggcgatccggctggtctcgctaagcaataatccctccaccaagtcttggcggatccagacaagcgaaatgtagcaaaatcaaccccattggtctcaacaatacccatgtttctgagaacctcgtggcagctgtctagataatcctggggatcctcagtagatgcaccggcaaaagtagaagtgaagagcttggtgaacctatccagtctccacaaagcatcggcggacatagccgctccatcgccggtctgagctatggcacccggctgaactaccccaactggctgaaccgctggagtctgaatctggggagctacctgctccggagtgcgtgtagcaggagtctgagcccctcctccagcctgagaagtggctggtgctacaggaagcaaacctgttcgggtgactctctccat

SEQ ID NO: 13 - DNA, 2639 bp, Nicotiana tabacum
atggcttatcctgcagtgaactctttaattcaaactttggagctattccaaaagacttatccagcattgatccatggtcaaactgcagagatgattgactctctccatgccagtgctgaatattttcaaaatattcttgagaacgctagccaccagaaacaggaatatgatacattcaaatattttgaggcagagataagatcagcgatgcaccaagctgaagatgtgcttgaatcaaatgttgcggaaattatgagagaatgatggaggcaacaagaagagaataatattgacgagacttttcaggatgaagtaggggttcttcttcgagtcttgcctcaagcggtagacaagattgatgctgtaaagaaataggtgaggcggattaactccttctccactgaaacctatgctcgttgccttggcccccctgatgatgaggatcatttcttcaaaaagggacattctctggtagctggttcttcttcaaaccttgctcctacttcccttctaggtgatgatgatgatgatgatgatacagtcggtttggcgaattccttgagaaaactcactgatgcactacttggattagcttctgagcagaacgtcattcctattttgggaatgggtggatgtggcaataccacacttgctaaaaaggctcaagatgatcaatcaattagatcacattttgacatccaaacgtgggttactatatctcaagaatatcacttaaacgaagtgttgccaagccttgcacgtagccttacaggatacgagtttcagggaatgagtgatgaccagttaatggaccagtcatataaagcacttaagggtcggaagtatcttatcgtagttgatgatatttggagtacaaagatttgggatttgattgcgagaacccttcctgatgacaataatggaagtcgaatcattctgactacgaggctaaaagatgtggctgagtatgctaaccctgatatccctcctcttgaagtgctgccgttaggggtagatgagagttggaagttacttcagaataagttgttggggaaaagccacattaattgtcattctgaattagaagatatcgggaagaaaatagtacaaaaatgccagggactgcctctagcaattttggtggttgctgggcatctctctaggatttccccaaaaagggaaaactgggtaactgtatctgaaaatgtgaatgaagttgttacaagttatccgaatgaatgcatagcagtgcttgcgatcagttaccatcacctgcctattcacctcaaaccttgtttcctccatatgggagcattccctgaggattctgagattgatgcttggcggttaattcgtctgtgggttgcagagggttttctgaagagggataagctgagaagcctggaaaaagtggcagaggattgtttggaagatctggctagcagaaatttaataatggtcaaaagggggaaactcaatggccggatcaaaaatttgccgtatgcatgacttgttggggatgtgagcgcttccggatgtgtttagaactaatcaaattcctaattttcattatgagactcctcgctttagtttgcatacacgcatttcaggggaaaactttaccaagtcagcaaaatttttgcgttgcttgtatcttttcaaggaacctcataaaacaataggaaaaccattggaattcaaagctttgagggtgttggctgccattcctaggtatcatttcatcttcaggcgtcgcatgaccttagattcagctatcttgagattcacatagacaatcattttactgaatcacttgaatatatgcataacctgcaaacctttagttttgttcatcacaatctggagtggcgtggaattttaactttacctaaccatatctggaatatgaagcagctgaggcatctccgtctacatggtagcacttatttgcccaacccatatgtggtagacgagttgggtctgcaacatctgcaggagctttccagtctctgtcttgctagctgtacaaaagaggtatttcttggccttcctcatctaaagaaattacgtatctatgatatcggggaaaaatacaaagcattagaggaaacatgttggagcctgctctacttgaataaactccgagtattagagtgttcctttgatgaagggaactctctctggctaaatgttgtttcccaatatcgctaaagagattgaccctatctggaagttggcttccctgggaagacatggcaaatcttgccaagttaccaaatctccaactactcaaacttagatgtcatgcattcagaggtgaggtatggaaattaaaggaggaagatgagttcaagcagctaaagttccttctacttgatgacacagagacacaactctgggaggctaccaatgttaactttccaaatcttcaacgcctcgtattggagaaaatcaagattcttaggcgaattcctatagcctttgcagatacatacaccttggagtcaattgagttgtataaatgcggtctaattgtggattcagccagagaaattcaggaggaagtagctgccatggcgggaagtgattgtcttgctcttcgcatatatatatatgaaggtaacgactttcagaattaa

SEQ ID NO: 14 - DNA, 1207 bp, Nicotiana tabacum
atggcgagaacacacgcttcctcatcaattgataagcagcccgagcccccagcagcagctcccacgaggggcagagggcgaggccgaggtaggggcagagctcagcctagagcagcagcaccagcggcggagcctcaggttgagtttgatgatgaggttacgacccaggaagttccggtgggcctagctcatgtctcagaggggttcattgctaccccagtactccaagatgctctggtccgtctagtgggccttatggagagtgtcacccgggcatacttgcttcatcgtagcaccaaccatctctcaagctggaggaggagcccaaactcctactactcgcacttcggagcagatggctccccagtttcagactctaacaactcagccagttggagcagttcagccggatgtggtagctcagaccggtgatagagcagctatgtctgtcgatgccttgtggagattggacaggttcaccaagctcttcactaccacttttagcggtgcatctttggaggatccccaggattatttggacagatgtcatgaggttctcaggaacatggggatattggagaccaatgggatcgactttgctactttttgcttatctggattcgccaagacttggtggagggattattgtttggccagaccagttgggtcaccagctttggcttgggatcagttttctcacctttttttggagaagtttcttcccgtcactcagagagagatctatcgaagacagttgaatgtttccaacagggttctatgactattactcagtacgagaccaggtttattgatttggcccgtcatgatctacttatactccccattgagagagagagtgaggaggttcattgagggactcattcagcctattcgacttcagatggatgaggagacagggagtgagatttctttccaggaggtagccaatgtggctaggagagttgagatggttctatcgcagagaggtggtcaggagtctgataagaggcctcgtcattcaggcagattcagtggcgcctcatctggaggaaaggatttgtatggtagaggccaaccttctaggctttttcattcagcacttcaggtttctcacggtgcttcaggtggctgtggtcctcatatgcaatattctgatcagcagtcctacagtgcaccaccaactcctatcagtgcaccgtcgctttag

SEQ ID NO: 15 - DNA, 1335 bp, Nicotiana tabacum
ctagcaacgacgaggacactgcctccacatatgtccaaactctccacactcaaaacaactcccaggtgctggagaaggggactgaagggaacccctcgcaccggagtgaccagctgatgcactcggcatagaagaaccctgagctgacggggcacgagatgaactctgggctggaagggcactaagtgatgactggccctgctgagatccatgataaccatgacccgaagatgccccacgataacctgggcgggctgactgagcaggcctgaaagaacgacctctaccatgctgaaactggcccctcgaaggagcaccactataactgccccctcgaggcctcttggcctccctctcctctcgatcctgacggcgaaccgtctcaatctcgcgagcgatatcaaccacctcctcgaacgtagcacccaacaccctctctcgggtcataagaatacggagatgatagttaaggccatcaacaaatctcctgatcctctcacgatctgtcggaaccatccaaatggcatgacgagccaactcagaaaacctcgactcatactgtgacacagtcatatccccctgtcgcaaccactcaaactgtctacgcagctcctctctgcgggactgcggtacatacttctccaagaagagagtggagaactgctgccaagtaaggggcgctgctccaaccggcctacgcctctcatacgcctcccaccaagtgaaggcagccccagtaaactgaaaggtggtaaatgccacaccactagactcaagaatccctgctgtacggagcatccgctgacacttatccaagaaaaccctgggcatcctcgccctcagcaccactgaatgacggaggctggagtctaccaaacctctcaagagacgctgctcatcatccggcataactggcacaacaaactcctgagctggtgcaaccggctgggctggaggtgcccccggcgtctgaagtccctgcactacctgctcaggtgtgcgagcagcgggggtctgattgcctccggcctgtgaagtagctgctgctgtagtggctgaaactgcctgagccaggccagtgcaaactgataagatctgtgccaaggcctcctgaagacccggaatcacgatgggcacagctggtgcctgaactggtgctgctggagcatccatagctggagcctgatccggagctagggcagctggtggatctacaggtgctgccctcgctgctctgcctctgccacgaccacgaccgcgtccacggcctctggtggtctcagctggtggcactggtggtcgtccacctcgtccggtagctcgcgtcctcaccat

SEQ ID NO: 16 - DNA, 4422 bp, Nicotiana tabacum
atggggatagttgagaccaatggggtcgattttgccacttttcgcttgtctggatccgccaagacttggtggagggatttctgtttggctagaccagccggatcaccagctttgacttgggagcagtttactcagctatttctggagaagtttctccccatcactcagagagaggcctatcggaggcagtttgagcgtctccagcagggttctatgactgttacccagtatgagaccagattcatcgacttggctcgtcatgctcttcatacttcccaccgagagagagagggtgaggaggttcattgatggacttattcagccgattcgtcttcagatggctagggagactgggagtgagattactttccaggaggcggccaatgtggccaggagagtggagatggttctgtcgcagggaggtggtcatgggtcgacaagaggccccgtcattcaggcagattcagtggtacctcgtctggaggtagggattcatatggtagaggccatcctcctaggccttttcagtcagcacttcaggtttctcacggtgcttcaggtggccgtggttctcagatgcagtattctgatcagcagtcctacagtgcaccaccagctcctatcagtgcaccgccgctccagagttttcggggtggtcattcaggtcgcagggtcagtcagtttcctcagcagcactcaggtggatgttttgagtgtggtgatatggtcatatccctctcagcagcagggttcccgtgctatggttcaggcaccaggtgttccacagccgcccagccagctagaggtgggggtagagaggtgctagaggtggagcttagaggtggaggccagccagctgcaggccatcccagagatgtagttcagggtggtgggcccagccccgatgttatgctcttccagccaggcctgaggctgaggcttccgatgcagttatcacaggtactgttctggtttgtgatagagatgcttcagttttatttgatccagggtctacgtactcctatgtgtcatcttattttgcaccgtatctggtcatgcctagtgattctttgagtgcctgtatgtgtctacaccggtgggtgattctattgtggtagatcgagtccatcgttcttgtatagttgtgattgggggtcttgagactcgtgtagatttgcttcttttggacatggttgattttgatgtcatattagggatggactggttatcaccttaccacgctatcttggactgtcatgccaagactgtgaccttagccttaccgggtttacctcgtttagagtggagagggactcctggtcattctacccgtagtgttatctcttatgtgaaggctcggcgtatggtcgagaaggggtgtttggcctatttggcatatgttcgtgattctagtgctgaggttccttctattgattctgtgcccgttgttcgtgagtttcctgaggtattcccttcagacctgccgggtatgccacccgacagggatattgacttttgcattgatttggctccgggcactcagcccatttctatccccgtatcgtatggccccgcctgagttgaaagagttgaaggagcagttgcaagacttgcttgagaagggtttcattagaccgagtgtttcgccttggggtgcgccggtgttgtttgttaagaagaaggacggatcgatgagaatgtgtattgattaccggcagttgaacaaggttacaatcaagaataagtatccattgccgaggattgatgatttgtttgatcagcttcagggtgccaaggtattttcgaagattgacttgagatctggctaccatcagttgaggattagggcatccgatgtccctaagacagctttccgcactcggtacgggcattatgagttcttggtgatgtcattcgggttgacaaatgccccagcagcttttatggatttgatgaaccgagtgttcaggccttatttggattcgttcgtgatagtcttcattgatgatattttgatatattcccgcagccgggaggagcacgagcagcatcttagagtggttcttcagaccttgagggatagtcagttatatgctaagttctcgaagtgtgagttctggttgagttcagttgcattcctgggtcatgttgtatcagcagagggtattcaggttgatccgaagaagattgaggcagtcaagaactggcctagaccagcatcagctacagagattcggagtttcttgggattggcaggctactatcgtcggttcgtggaggggttttcatctatcgcagccccgatgaccaggttgacccagaagggtgcccagttcagatggtcggacgagtgtgaggcgagctttcagaagctcaagacagctctgactacggcaccggtgttggttttgcccacaggttcagggccttatacagtttattgtgatgcatctcgtattggacttggtgcagtgttgatgcaggatggcaaggtcattgcctatgcttcgcggcagttgaagattcatgagaagaactatccggttcatgatttggagttggcagccattgttcacgcattgaagatttggaggcattatctgtatggcgtggcatgtgaggtgttcacggatcacaagagtcttcagtatttgttcaagcaaaaggagttgaatttgaggcagaggaggtggttggagttgttgaaagactatgatatcaccatcttatatcatccgggaaaggccaatgtggtggccgatgctttgagtaggaagtcagccagtatgggcagtcttgcttatattccggtcggtgagagaccgcttgctttggatgttcaggctttggccaatcagttcgtgaggttggatgtttctgagcccagtcgtgtgttagcttgcacggtcgctcgttcttctttattggagcgtatccgtgatcggcagtatgatgatccccatttgtgtgtccttagagacacggtgcagcacggaggtgccaagcaggttaccttaggtgatgatggagttttgagattgcagggtcgagtttgtgtgcctaatgtggatgggcttcgagagttgattttagaggaggcccatagctcccggtactctattcatccgggcgccgcgaagatgtatcaggatttgcggcagcattattggtggcggagaatgaagaaggatatcgttgcatatgtggctcggtgtttgaattgtcagcaggttaagtacgagcatcagaggcctggtggttcatttcagaggattgagcttcccgagtggaagtgggagcggatcactatggatttcgttgttggactcccgcagactcggaggaagttcgatgcagtgtgggtcattgttgataggctgaccaagtcagcgcatttcattcctgtggcagtctcctattcttccgagaggttagctgagatctatatccgggagattgttcgtcttcatggtgtgcccgtgtctatcatttcggaccgaggtacgcagtttacctcatttctggagagcagttcagcgagagttgggcaccggttgagttgagcacaatttcatcctcagacggacgggcagtccgagcggactattcagattttggaggatatgctccgagcttgtgtcattgactttggaggctcgtgggatcagtttttgcctttagcagagtttgcctacaacaacagctaccagtcgagtatccagatggctccttatgaggctttatatggtaggcggtgtcggtctccggttggatggtttgagccgggagaggctcggttgttgggtacggatctggttcaggatgccttggacaaggtcaggattattcaggataggcttcgtacagctcagtccaggcaaaagagttatgccgaccgcaaggttcgtgatttggcattcatggtcggtgagcgggtattgcttcgagtgtcgcctatgaagggcgtgatgagatttgggaagaagggcaagcttagccctaggttcattggcccgtttgagattcttgatcgagtgggagaggtggcttatagacttgcattgccgccgagcttatcagccgtgcatccagtgtttcatgtgtccatgcttcggaaatatcacggcgatccatcccacgtgttagatttcagcactgtccagttggacaaggacttgtcttatgaggaggagccggtagctattctagaccggcaggttcgtcagttgagatcgaagagttttccttctgttcgtgttcagtggagaggtcagcctcctgaggcatcgacctgggagtccgagtccgatatgcggagccgttatccccatcttttcctcaggtacttcagtccgttcgaggacgaacggttgttttagaggtggagaatgtgatgacccaaaaggtcatcacttgttttaa

SEQ ID NO: 17 - DNA, 2586 bp, Nicotiana tabacum
atggtgaagacttctaaaatggctccccaaaaagtcacttcttcttctcaaccgaccaccaaaattgatgaaaccactcctgatgtggtcgacctggagaggtacgctgctgatgtggttaccgatgaaccggctatcgaacctcccttaaaaatgttcattcccgagggttgtttggtcgccgacgactttaaggttgagaatccctcttcggtgtagggtcagcatgaggaggcatcgagatatatatgctcgatcaccgaagatgtcctccttgaagtccgaaatgactgcaactgggcagataaggacatagtggtccccgaccctgaggaggccattactacccatatcgagggatatctaagtatttacacttatcccttcacactaggcccggtggacccgaccattatagacttctgttagaggtacaaagtatgtctcagtcaaatccacccatcgctgaggaggattgcaatcttcattcgattcatcgtgaacaagatcgactcctatcagctcacggttgatcatctactccgcttgtacagttcccgaatcttctgagggggctaataaagctcgtgcaccgaactaacaaagcatcattctcaagcatcgatgaggactggtattgaggctggcatgggagctttgctgggtaaggacctcagacttgatccctaccaaatttaggccattccccgagaggtggaatgcatcacgtaagcacgactttcctttaaatgttgatttatgttcatctcttttttcctcattggtatttgtggtggtacaattgttgctcgagtccccaacactatccctcggctcaagaagtggattgaggatatcatctcacagatgccttactccgagcgctcgtggcgcaaactctcgaagggccgttggtaggctcgttcccatggtaagatttatttcccaaataagttacattaggcttctccttctagcatcacgttctcattttcttgattcctctactttagggcagctcggggctgcatcaggagagaagaagaagaagaagaaaagaaaggctttgggttccccgagctcagagaagaaaaaaccgaagagaagattggcctataagccaaaggatagctccagctctcgagcaccagactcagacttgctctactggctcagggaagagcatgaggaggatgatctttttacggcctacgaaccgacctcccccaaagagcgggcgatagccgaggaggagacaacaaaggcctgtctttctcaggttcgggagaccgatgtagaaacgagggctcagccttctcgagacgctggctctgctccacccagcatcaaagaaatttctgggtcaccttctttcaccgaatctatgttggacaaagctcgagcggagaaggagagatataacgaaggggcctatggtgtggacgacccccttcgttgcctttttgaaggtgtggactcaaccgccctaaaagacttctccggttgggttatttggagctgccgagactatctttggaggtcagcgggctgaactcgagcccaaaattaaacaatcgattccctgccccgagcatggatctcgacaaaaagcagtcaataatcatcactgtcctggtagatgccttggttcttttcgcccccgttggagtagctagataccttcggtgcctagtaaccaataaagagtaggaaaagtgaatgaggtggacacaccgtgcttgttcaacaaagcatagcaggcgctgaaccaggtaatgcatcattaccctctttcatcttcgtattttagtctttgatatctatgatgccttttttttatatttttgcaggctttggtacttcatcataaaaattttctctggtaccagcctgaggttaaccagctcgaggctgaggtcaaggagcttgctgagaagagggacacatataagtttctcagcgagaaacataaggaagcggtcaagagtctttgaacaaagtcggacgcgggtcagaaggagcatgctgacctccgagtcagatgaacgaggccaagtccatggctgaaaggtggaaagaaaaaatggatcgattggcttcggagaaagagactgcccgggagcaactgacatcggtgtaggtccaactccgagtggcaaaagagaaggaaaatgcatgtgctcgacaaatcgatgacctccatgctcaactaggctcagctgctgctaaacgggatacctttaggaaggagctcgaatcagtgaagtctgtgtcagaaataactaggggtgatgctgaagagatggtggcccagtacagggccgatgtcgaggtagcccaggacctccttaaagttactattgagtacgtaagtggttgtcctgaagggagactctcgaggaggtccatgtccagggtttctacctgttagccgagattgaagatgcaaaaaggctcgaggccgaggccaagaagctggctgaccccaaggatggggagggctatgagggctccggtgaccccgaggatggagaagaccctgacaaccctactaacgaggtgggttctggtgaagatcgggcttag

SEQ ID NO: 18 - DNA, 3476 bp, Nicotiana tabacum
atggcgagaacacgcgcttcctcatctaccgctcagcagcccgagcccccagcagcagctcccactaggggcagagggcgaggccgtgctagaggccgaggtaggggcagagttcagccccgagcagcagcaccagtggcggagcctcaggttgattttgaggaggaggttccggccccagcagttccggtgggcccagctcaggtcccagaggggtttattgctaccccagttcttcaggacgctctggtccgattggtgggcctcatggagagtgtcacccgagcaggtttgcttcctgtagcaccagccacttctcaggctggaggaggggctcagactcctgctacacgcactccggagcaggtagctcctcagattcagactccagcggttcagccagttggagcagttcagccgggtgtagtagctcagaccggtgatggagcggctatgtctgccgatgctttgtggaggctggataggttcaccaagctcttcactactactttcagcggtgcttcttctgaggatccccaggattttctatatagctgcacgaggttctcaggaacatgggtattgttgagaccaatggggtcgattttgctacatttcgcttgtctggatccgccaagacttggtggagggattattgcttagctaggccagccgggtcgccatctttgacttgggagcagtttacagtattgtttctggagaagtttctccccgttactcagagagaggcctatcggaggcagtttgagcgcctccagcagggttccatgacggtcacccagtatgagaccaggttcatcgacttagctcgccatgctcttgtcatacttcctaccgagagagagagggtgaggaggtttatcgacggtcttattcagccgattcgtcttcagatggccaaggaggccgggagtgagatcacttttcaggaggcggccaatgtggcccgcagagttgagatggttctgtcgtagggaggtggtcaggggtcggataagaggccccgtcattcaggcagattcagtggtacctcgtctggaggtagagattcatatggtagaggccatcctcctaggccctttcagtcagctcttcaggttttcacggtgcttcaggtggtcgtggtcctccgattcagtattctgatcagcagtccttcagtgcaccaccagcacctatcagtgcaccgccgcttcagagttttcagggtcgtcagccccagcagccgagggcttgttttacttgtggcgacacgaggcacattgctaggtattgccctcgagcttcgagcagttctccgcatcagggttcccgtgctatggttcaggcaccagatgttccacagcccgcccagccagctagagctagaggtggaggtagaggtcctagaggtggagctcaggccgccagaggtggaggccagccagcagcaggccgtcccagagaggtagttcagggtggtggggcccagccccgatgttatgctctcccagccaggcccgaggctgaggcttcagatgcagttattacaggtacggttctggtttgtgatagagatgcttcagtgttatttgatccagggtctacatactcgtatgtgtcatcttattttgcaccgtatctggtcatgcctagtgattcgttgagtattcctgtttatgtgtctacaccggtgggtgattctattgtggtagatcgagtccatcgctcttgtgtagttgtgattgggggtcttgagactcgtgtggatttgttgcttctagacatggtcgatttcgatgtcatattggggatggactggttatcaccttaccacgctatcttggactgtcatgccaagactgtgaccttagctttaccgggtatgcctcgtttagagtggagagggactcctggtcattctacccgtagcgttatttcttatgtgaaggctcggcgtatggtcgagaaggggtgcttggcctatttagcttatgttcgtgattctagtgcggaggtttcctctattgattctgtgcccgtggttcgtgagtttcctgaggtattcccttcagacctgccgggtatgccgcccgacagggatattgacttttgcattgatttggctccgggcactcagcccatttctattccgccgtatcgcatggccccgcctgagttgaaagagttgaaggagcagttgcaggacttgcttgagaagggtttcattagacccagtgtttcgccttggggtgcgccggtgttgtttgttaagaaaaaggatggttcgatgagaatgtgcattgattaccggcagttgaacaaggtcaccatcaagaataagtatccactgccgaggattgatgatttgttcgatcagcttcagggtgccaaggtattttcaaagattgacttgagatctggctaccatcagttgaggattagggcatccgatgtccctaagacagctttccgcactcggtacgggcattatgagttcttggttatgtcatttgggttgacaaatgccccagcagcttttatggatttgatgaaccgagtgttcaggccttatttggactcgttcgtgatagtcttcattgatgatattttgatatattcccgcagccaggaggagcacgagcagcatctcagagtggttcttcagactctgaaggatagtcagttatatgctaagttctcgaagtgtgagttctggttgagttcagttgcattcctgggtcatgttgtatcagcagagggtattcaggttgatccgaagaagattgaggcagtcaagaactggcctagaccagcatcagctacagagattcggagtttcttgggattggcaggctactatcgtcggttcgtggaggggttctcatctattgcagccccgatgaccaggttgacccagaagggtgcccagttcagatggtcggacgagtgtgaggcgagctttcagaagctcaagacagctctgactacggcaccggtgttggttttgcccacaggttcagggccttacacagtttattgtgatgcttccgtattgggcttggtgcagtgttgatgcaggatggcaaggtcattgcctatgcttcgaggcagttgaagattcatgagaagaactatccggtcatgatttagagttggcagccattgttcacgcattgaagatttggaggcattatctgtatggcgtggcatgtgaggtgttcactgatcacaagagtcttcagtatttgttcaagcaaaaggagttgaatttgaggcagaggaggtggttggagttgttgaaggattatgatatcactatcttatatcacccgggaaaggccaatgtggtggccgatgcttgagtagaaagtcagccagtatgggcagtcttgcttatattccggtcggtgagaggccgcttgcttggatgttcaggctttggccaatcgatttgtgaggttggatatttctga

SEQ ID NO: 19 - DNA, 4967 bp, Nicotiana tabacum
atggcgagaacacgcgcttcctcatctaccgctcagcagcccgagcccccagcagcagctcccactaggggcagaggccgaggccgtgctagaggccgaggtaggggcagagttcagccccgagcagcagcaccagtggcggagcctcaggttgattttgaggaggaggttccggccccagcagttccggtgggcccagctcaggtcccagaggggtttattgctaccccagttcttcaggacgctctggtccgattggtgggcctcatggagagtgtcacccgagcaggtttgcttcctgtagcaccagccacttctcaggctggaggaggggctcagactcctgctacacgcactccggagcaggtagctcctcagattcagactccagcggttcagccagttggagcagttcagccgggtgtagtagctcagaccggtgatggagcggctatgtctgccgatgctttgtggaggctggataggttcaccaagctcttcactactactttcagcggtgcttcttctgaggatccccaggattttctatatagctgtcacgaggttctcaggaacatgggtattgttgagaccaatggggtcgattttgctacattccgcttgtctggatccgccaagacttggtggagggattattgcttagctaggccagcgggtcgccatctttgacttgggagcagtttacagtattgtttctggagaagtttctccccgttactcagagagaggcctatcggaggcagtttgagcgcctccagcagggttccatgacggtcacccagtatgagaccaggttcatcgacttagctcgccatgctcttgtcatacttcctaccgagagagagagggtgaggaggtttatcgacggtcttattcagccgattcgtcttcagatggccaaggaggccgggagtgagatcacttttcaggaggcggccaatgtggcccgcagagttgagatggttctgtcgcagggaggtggtcaggggtcggataagaggccccgtcattcaggcagattcagtggtacctcgtctggaggtagagattcatatggtagaggccatcctcctaggccctttcagtcagctcttcaggcttttcacggtgcttcaggtggccgtggtcctccgattcagtattctgatcagcagtccttcagtgcaccaccagcacctatcagtgcaccgccgcttcagagttttcagggtcgtcagccccagcagccgagggcttgttttacttgtggcgacacgaggcacattgctaggtattgccctcgagcttcgagcagttctccgcatcagggttcccgtgctatggttcaggcaccagatgttccacagcccgcccagccagctagaggtgggggtagaggtgctagaggtggaggtagaggtcctagaggtggagctcaggccgccagaggtggaggccagccagcagcaggccgtcccagagaggtagttcagggtggtggggcccagccccgatgttatgctctcccagccaggcccgaggctgaggcttcagatgcagttattacaggtacggttctggtttgtgatagagatgcttcagtgttatttgatccagggtctacatactcgtatgtgtcatcttattttgcaccgtatctggtcatgcctagtgattcgttgagtattcctgtttatgtgtctacaccggtgggtgattctattgtggtagatcgagtccatcgctcttgtgtagttgtgattgggggtcttgagactcgtgtggatttgttgcttctagacatggtcgatttcgatgtcatattggggatggactggttatcaccttaccacgctatcttggactgtcatgccaagactgtgaccttagctttaccgggtatgcctcgtttagagtggagagggactcctggtcattctacccgtagcgtgtgtaggtgcttggcctatttagcttatgttcgtgattctagtgcggaggtttcctctattgattctgtgcccgtggttcgtgagtttcctgaggtattcccttcagacctgccgggtatgccgcccgacagggatattgacttttgcattgatttggctccgggcactcagcccatttctattccgccgtatcgcatggccccgcctgagttgaaagagttgaaggagcagttgcaggacttgcttgagaagggtttcattagacccagtgtttcgccttggggtgcgccggtgttgtttgttaagaaaaaggatggttcgatgagaatgtgcattgattaccggcagttgaacaaggtcaccatcaagaataagtatccactgccgaggattgatgatttgttcgatcagcttcagggtgccaaggtattttcaaagattgacttgagatctggctaccatcagttgaggattagggcatccgatgtccctaagacagctttccgcactcggtacgggcattatgagttcttggttatgtcattttgggttgacaaatgccccaacagcttttatggatttgatgaaccgagtgttcaggccttatttggactcgttcgtgatagtcttcattgatgatattttgatatattcccgcagccaggaggagcacgagcagcatctcagagtggttcttcagactctgaaggatagtcagttatatgctaagttctcgaagtgtgagttctggttgagttcagttgcatttctgggtcatgttgtatcagcagagggtattcaggttgatccgaagaagattgaggcagtcaagaactggcctagaccagcatcagctacagagattcggagtttcttgggattggcaggctactatcgtcggttcgtggaggggttctcatctattgcagccccgatgaccaggttgacccagaagggtgcccagttcagatggtcggacgagtgtgaggcgagctttcagaagctcaagacagctctgactacggcaccggtgttggttttgcccacaggttcagggccttacacagtttattgtgatgcttctcgtattgggcttggtgcagtgttgatgcaggatggcaaggtcattgcctatgcttcgaggcagttgaagattcatgagaagaactatccggtcatgatttagagttggcagccattgttcacgcattgaagatttggaggcattatctgtatggcgtggcatgtgaggtgttcactgatcacaagagtcttcagtatttgttcaagcaaaaggagttgaatttgaggcagaggaggtggttggagttgttgaaggattatgatatcactatcttatatcaccgggaaaggccaatgtggtggccgatgcttgagtagaaagtcagccagtatgggcagtcttgcttatattccggtcggtgagaggccgcttgctttggatgttcaggctttggccaatcgatttgtgaggttggatatttctgagcctagtcgagtattagcttgcacggtcgctcgttcttcattattggagcgtatccgtgatcggcagtttgatgatccccatttgtgtgtccttagagacacggtgcagcgtggaggtgccaagcaggttaccttaggtgatgatggagttttgagattgcagggtcgagtttgtgtgcctaatgtggatgggcttcgagagttgattttagaggaggcccatagttcccggtactctattcatccgggcgccgcgaagatgtatcaggatttgcggcagcattattggtggcgtagaatgaagaaggatattgttgcatatgtggctcgatgtttgaattgtcagcaggttaagtatgagcatcagaggcctggtggattgtttcagaggattgagcttcccgagtggaagtgggagcggatcactatggacttcgttactggacttccgctgactcggaagaagttcgacgcagtttgggtcattgttgataggctgaccaagtcagcgcatttcattcctgtggcagtctcctattcatccgagaggttagctgagatctatatccgggagattgttcgccttcatggtgtgcctgtatctatcatttcggaccgaggtacgcagtttacctcgcgtttctggagagcagttcagcgagagttgggcaccaggttgagttgagtacaacatttcatcctcagacggacgggcagtccgagcggactattcagatttggaggatatgctccgagcttgtgtcattgactttggaggttcgtgggatcagtttttgcctttagcagagtttgcctacaacaacagctaccagtcgagtatccagatggctccttatgaggctttgtatggtaggcgatgtcgatctccggttggatggtttgagccgggagaggctcggttgttgggtacggatctggaggccttggacaaggtcaggatcattcaggagaggcttcgtacggctcagtccaggcaaaagagttatgcagaccgcaaagttcgagatgtggcttttatggttggtgagcgggtattgctccgagtgtcgcctatgaagggcgtgatgagattcgggaagaagggcaagcttagccctaggttcattggtccatttgagattcttgatcgagtgggagaggtggcttatagacttgcattgccgcctagcttatcagccgtgcatccagtatttcatgtgtccatgcttcggaagtatcacggcgatccatcccacgtgttagatttcagtactgtccagttggacaaggacttgtcttatgaggaggagccgtggctattctagaccggcaggtcgtcagttgagatcgaagagttttccttcggttcgtgttcagtggagaggtcagcctcctgaggcatcgacctgggagtccgagttcgatatgcggagccgttatcctcatttattccccgactcaggtacttccttcttctgtccgttcgaggacgaacggttgttttag

SEQ ID NO: 20 - DNA, 1593 bp, Nicotiana tabacum
ttagatgagaaaaatgtaaataatccaagcatcgtatctcttgattgcgtctgaattaattggttttggccaaattgctccatcaatttttgcaagtatgggtgctcctcctgtcagcaccctgtgaaccatatacgaaccttgccagttgagggagaatttcccttttgattcatcttaatgtgggaagatcttctgcagcaccaactgacctggtgtaaattgccttagtttgaccctttagttgaaagctctggacattatgttctgataaatttggccttggcacactgcattcatcctctttccatcgatgaaggccaattgttcatagcgacttcttatctattctgcatcgctgagttcagcttcctatatgactctcaaagaagcaatctctacttcggctgggatgacaacttcggtaccgtaaactagcatgtaggaagttgccctggttaatgtgcgaaccatagtgcgatatcccaataaagcaaatggtagcttttcgtgccactatttgtgattctctaccatcttccttagtatcttcttgatgtttttgttggccgcttctacggctctattcatctgaggtttgtaggttgtggaattcttgtgcttgattttgaaagtttcacccatggcttttatcagatcactattgaggttggcggcattattagtaagaatggactcgggaactcctaatcgacaaacaattcgatccttgacaaaatctacgatgactcttttggttacagctttgtaagatgcaacctctacccattttgtgaagtaatcaatggctactagaataaacctgtgttcgtgtgaagcagtgggctaaatcggaccaataacatccattccccaagcggcgaatggctaatgagagcttgttacattgagctcgtttggcggcacttttatcatatcggcatgcacctggtattgaaagcatttgcggacatactggatgcaatccgtttccatggtcatccaaaagtaaccgaccctaagtatcttcttagccaagacgaaaccattcatgtgcaggccacaagtcccggcatgtacatcctcaagtagcttagaagcttcctttgcatcgacacatcttaggaaacccaaatcaggagttctcctgtacaaatttcctccgccgtggaagaagtgattgtaaaatctctggagtgtgcatttctgagtgtggtttgcgtgctcaagatattctccctttgacaaatacttcttgatgtcatggaaccaaggctttccatctatttcttcttcaacatgagcgcaatatgccgactgattatggatcttcactgggatgggatcaatataatttttatatggatgttgtatcatagatgacaaggtggctactgcatcgacaaactcattctgaattctgggcacatgtcgaaattctatcttcatgaacctctttcttaattcctgcacatggtgcagatatggcaatatcttggaattcttggtggcccactctccttgtacctggtgcataagcaaatctgaatcatcgatcactagcaactcttgaatgttcaagtcgatttccat

SEQ ID NO: 21 - DNA, 1508 bp, Nicotiana tabacum
ctagatggacaacttagatgaggcagtcttcatccagttgttgaaatttagaagtgcctggcttagacggtgggtagtaatatgatgggcccagtaagatgggatctccgggcccgctgatgtggatagaccagcaggaatagctgtggatgtggaaggtccgggagagatgtcagcaggagtagaggtaggctcagcagggacctctaccataactggatctttagactggacaattggggcagaagcatgagctttgtagttcttgctcttggggttgttatcccccttcatgctataccaggaaaatggggctatctccttgaccttgatgtcatagggcctctcatccactttcaggtcccggaagtactcagtcaggaagctggggaatggattgtttctatcatgctcggcacccacaatagtaataatcctcgacatcacattccccatattgatggggtaccccaccataatagaagtgaccaatacagcccgatggagaggaaaggcgttgtcatgagtggtagggtccaaccggctgcaaacaaaagtctctcatcccctcgcttcaaagttcaggctctttctcaatattttgattccagcagccaaccagtcagggacggtacgtgggattgccaagtactgtgctagccatggacaaacctcctctcccatttccaaatttgccatgtataaggtctcgtcctctcattgaagctcaggtattcatttatatacttcccatcaaacaacaccttccaattttgaaccttggtcactttggagccctttttgatgtgggctacattgctgtaaaattctttgaccaagtgttcgttggaatcctcacacttatcaaggaaatggtcccagccaactctcatcctaaactgtctcctcatgttggggttgtgaggtagcaagtcactatcaatgaaactccgctccgggatcaactttctcaccggccaccactcctagaatttatggtatgccacttcactaacaaacctatcttgccaaacctcggctttctagttctcacaatcccccccccccccacacttgtggttcacctccttcttctacttcatcgtcaccacctacttcttcctcatctcctacaacaccctcttcagataatgaagctgtgggagtggtagagtattcatccctactacccgctggtgagccctcagacgacctagaagaaatgttcactgatgcttgggctgcggggaaaggggaagagtgtctctatgtctggccctctacggatacgagatgtattctgggattgagtccaaagagatatcccgagatggctcgtactcactccccgaaatgtcaatgtctttgtcagccacttttatggccttccttatgttcttgatgttttgcctagcttggggagtgagtttgaccattttctgtttccctcccagggaggattctcctcggcctggttgtttagagcctttcccttgttgtttcaccat

SEQ ID NO: 22 - DNA, 2919 bp, Nicotiana tabacum
tcattgtgggtacatcttgatcacatcacttgaaatgatgtgagtactttgttttgttagagaatgagtgggaggacagtgcagtacggcagaaacagtgacgccagtcacttcatttctagttgtgtccaattgactctgtacagctatgacgaaaccacaagagcatcaggtccttgtgtgggtttctagctcctgaagctgtagcagttcacctttagctggaatacgttaaagcttgcagcaatccaagtaggtcaggttccctatctagttcttaacagtaagtttgttagattatcaaaacataaggcaagagtatttaaaatatatcaatttcccctttttgatgatgacaaacttaacatttataaactggaattagggcagtaccagttttaaagtatcagggaacacagagagttccccctaagactatgccttatcttttacatgatcagagtagtaagaactagttcctccatgtgtgttccccctgattattatttttttccttcttttggcatcattaaaaaaataacagcacaaagaagtccagtgaagctaactcatgccacatatgtgcacacaatcatgatagagaatagaacacatagagtactgacataataaaactagaattaatattaataacgatttaatatacctctgcctatgaaaaaggctagaggcaacatttggacttgctaacgggagtagtaatgtttcctcccaaccatcaaaaaaagaaaacaaaaaaacatccgccaaaccatcaacaatgaaacaaaaacataagaaacatatccagaaaactggtcactaaaggggtactttagggcactaggagtaaaaggattggtagcagcagaaaatgcctggagaacgaggtctattaaggtgtttgccgacttttgctcgttgagcagttccgccttcaagttctcaacttgcgccctgagattagcattctcctgtgtcaaacaagccacttcatcattcgacatgggaaccccttgggcttgctgatcttccaggataacattcatggccttcaaccgatgaatttcctcagctgcactgttttggacgttgataagctgagaaacggttgatgtatttcctactcctcccccccaatacttttccacacactcacactcttccaaagttgtctatgagaatgtccgctttcgagaccccactttacctattcccagtggaactttaaagaatttgaacactggagtaagaaagaatccatagggaagtccatgattaccgtccttgaaggtggaaaccttttgcatgtgttcgatcataatagcaggaagaatcataggattgaaaccgtcaagttgctccattaggaataggtcagacttagaagtcactaacctcctttcggctcgaggcaacatgactttgttaaccaatttaaataacaactggtaaacagggagtagtgctttcttatggatctagtcccctttctgattagcattttctttcaccattgcatttctgaagttatactgacaaacatctcgtacactcaacaccctaactgtaggaacttttaaaatctctccaagcaattttacatcaaacacgatgtccaccccattgaccaaagcatagacatggtcagtatcaactggaaagaggctagcaaagaaactttgtacctcctcctcatacaccttaggtgcatccatgtgaaatagatgcacccaacgttgaaactcgaccatttccagaatttggcgcattccagccatatcagagattgttgggtcaaacatacgacccaatagaactttttgatgcctcaaaagctcagagccaaggctgacttcacttctcattttcttcatagaactaggttcgtcaaaagattccgacttgcgtttcccaaacttctctccactgactttgccttttgccttagacttaactagtacatcctcatcagacatagaaaactcactcactacctccttctttttggacttagatgttgaccctttctctattgacacaggctttgtctttttcaaagatcgcctaacaagtgaaccgggttcctctggagttccctcttccacctcgactacaaggatagcctcatcacttacaggtacaccatccttcaccaacttttttctttttttttcttactactcttcttgctcgtttggagagtagagtcgtaggccactttgacttgaagcgtggtagtaggtcgtttgatttcagactcaagggtggacgcaacccttcgcttacttatgaatgcatcaagagccacattatccaggtcttattcatcactagatcgtatttcaggtgcttgaattcccaggggcacaacatcaaatgcaggaatagtactgtcctagggatgagagccctaacctgggtcctccggagagggatcaggttcctcatgtgatgccccagtagtatctgctattgcatacccttcaatagccacaatggccccttattcctccacatcgtgtatctcatttttttgggatgtaatttcatgcaataccccatcagtggatactacaaacatagttacaacatctttcttttcttcaaccggtgcttccaaaaccatgaaatcggtggcaacgatttcagaacccttgtgaactcagtattttgaccttgttctccacttagggtttgattggtgggaacaacagacgatggggagaacaaaatagtagttttaaaggtttctgagttgggaagatattgggaaattggggaaggtgtgactgcagcagcaagagtggtagagggtgaggaaggctcagtcaaaatgaaaggttccatatatgggtcagtggtgtagaacctgctcatctccatagaggcaaagagatcggaagttttttcagccat

SEQ ID NO: 23 - DNA, 2397 bp, Nicotiana tabacum
ctaaggaacacacaaatggggatcatcatactgccgattacggatacgctccaataaagaagaacaagcggctgtgcaagctagcacatggctgggctcagagacatccaacctcatgaattgattggccaaatcccgaacatccaaagcaagcggtctctcaccgcccggaatataagcaagattgcccatactggatgacttcctactcaatgcatcggccaccacattggcctttcccggatgatataagatagtgatatcataatctttcaacaactctaaccacctcctctgtctcaaattcaactcctgttgcttgaacaaatactgaagactcttgtgatccgtgaacacctcacatgccacgccatacagataatgtctccaaattttcaatgcgtaaacaatggctgccaactccaaatcatggaccgggtagttcttctcatgaatcttcaactgccgcaaagcataagcaatgaccttgccatcctgcatcaacactgcaccaagttcaatacgatatgcatcacaatagactgtataaggccctgaatctgtgggcaaaattaacactggtgtcgtattcagagctgtcttgggcttctgaaagctcgcctcacactcgtccaaccatctgaattgggcacccttctaggttaatctagtcattggggctgcgatagatgaaaacccctccacgaaccgacgatattagcctaccaatcccaagaaactctgaatctgtgtagctgatgctggtctaggccagaaatgcaactaaactcaaccagaactcacacttcgagaacttagcatataaccggttatccctcaaggtctgatgaaccactctaagatgctactcgtggtcctcccagctacaagaatatatcaaaatatcatcaatgaagactatcacaaacgagtccaaataaggcctaaacacgcggttcatcaaatccataaaagctgttggggcattgatcaacccaaatgacatgaccaagaactcataatgcccataccgagtgtggaaagctgtcttagggacatcggatgccctaatcctgaactgatgatagccagatctcaaatcaatctttgagaacaccttggcaccctgaagctgataaaacaaatcatcgatcctcggcaatggatacttattcttgattgtaaccttgttcaactgccggtaatcaatatacattctcattaatccgtccttcttcttaacaaacaacaccggcgcaccccaaggtgaaacaagggtctaatgaaacccttctcaagtaggtgttgcaacttatccttcaactctttcaactcagacggagccatacgatacggcggaatagaaacgggctgagtgcccagatccaaatcaatgcaaatgtcaatatccctatcgggtgtcatacctggcaggtctgaagtgaaaacctcaggaaactcatgaacaacgggtacagaatcaatagagggaacctcggcactagaatcacgaacatatgccaaataggacaaataccccttctcgaccatacgccaagccttcacataagagataaacctacgggtagaatgactaggagtacctctccactctaaacgaggtaaacccgataaggctaaggtcacagtcttggcatgatagtctaagatagcgtggtaaggtgataaccagtccatccccaatataacatagaaatcgaccatgtccagaagcaacagatctacacgagtctcaagaccctcaatcacaactataaaagagcgatggactcgatctaccataatagaatcacccaccggtgtagacacatatacaggaacactcaatgaatcactaggcatgtccagatacggtgcaaaataagatgacacatacgagtacgtagaccctggatcaaataacactaaagcatctctatcacaaacaagaaccgtacctgtaataactacatctaaagcctcagcctcgggcttggctggaagagcataacatcagggatgggccccaccaccctggactacatttctgggacggcctgtagctggctggcctccacctctagcggtctgagctccacctctaaatcctctacctccacatctagaacctctagctggctgggtggtctgtggaaaacctggtgccccaaccatagcgcggaaaccctgctgctgcgactgagtacccactaacctcggacaagtcctcctaatataaccatactcaccacactcaaaacatccacctaagtgttgtggctgaggaaactgagactgaccctggcgacctgaataaccaccccgaaaactctggagcagcagtgcactgataggagctggtggtgcactgtaggactgctgatcagaatattgcat

SEQ ID NO: 24 - DNA, 895 bp, Nicotiana tabacum
atggttaagtttgggaagagaaccatcttgaaaggtaggctcctcaggaacttagaggaggaaggaatggtaatgcttctggagaagttacaggtgcaaggatggaaggacatggtctttcagatgatggaaggttggccataactgatattgtgcagtttatggcaaattgtgagatcaagatggtagggtcaccagtgtggtaaagggtgatggtgacttttgatgagaaagagctgagagagatcttggggtgcattctaaaggatacaatgactataagaagctcaaatggacaagcctagagaatctccctactgcccttgccagtactagaaaattttgtgacaatgaggaggaaattgagcccaaggctatttacaaaaatgagatgaagccacccaacaaagtgttgctccaatttgtaaacaaatgtgtgctgccaaggtaggaaaggaggcacatttccacattcatggacctggtccttatggaatgtttggacaataggcggcaaataaattggcctgggtctaaaattcagcttcttgacagggttctaaatggaactaagacttatgtcataccctatggttttattctcacgattgttcttgcacatttaaaggtacccatcaagaaatgggaagttggtacaaacaaggatcattttggggctaacactttgactgcttgtaactatgaggctcaaatcactcccaaaaaacctggttcatccaaaaaggtaccagtgaatagcaaagtgcgagttttggtgcaagaaagtagggcaaaggatgctgagcctgataggctaaagaagaggttggctgaaatggagaccgagagagatgctctcagagctgagcttgcaaaagagaatgagaagaattag

SEQ ID NO: 25 - DNA, 4787 bp, Nicotiana tabacum
tcaccggggaaacactggtctggggaatattccaaaggacacccttgcttccaaggaaagggacgccgagacttcgcctcggcctcgtattgatgtgttggtaaccctctcactcatttgacctattccaaataaaacatgtgttcatgaatacaggttgttcaattaattataccaacgatgtcaaaccaaagccaatggggcgattcggactaacgaaccaagtcactcccacatctcgaatctttgacagattctaggcaccgatcgccacatcaggaagaccactcccttaatacaacccgtatcagctcggactggaatgccgaacacgcaaggcacgtacgtcttattcagatgacaacgggcacgcctccccggaggcaacttcgaccctactccaccaaatggatgaaaccccaggacaagggtgggactaaagtattcgacaaggagctgcacacgacgagaggaaaaccctcaccatgtaacgcatcgccggcatcaatacgtccgccctcaaaaggatcaaagggtaagcagaatcgcatcttctgctaagcttggttgaacacagcagaaggctgtattagggctcgtgcctcggaacagcagaaacatcccgaacctcgaaaggttacctacgcaccccgcggtgaggaggaactacttcactccttcattattttttcactaacttatatgcaggcaatcagccggggcattcgaaagttctaactccacacggagatccaaggccttagcagggcccgttgtgctctattccctcgatcagactttagacccaaagagggtcccgccaaaaagattattagcagagcagtgtacccccaaagagggtcctgccagcaggatacgacaaaatcacatgccttcttctacaatcgaacgacgggcgatgatcttctttcaagggcaccattccctcagaaggaccgaaaatatcagactgagtgtcaagagggaaccttgtaacgaatcagatggtccgaagagtcgtacctacgtgggccgagctcacaacgacgagagaacatgtatttacaacatatatttatgacaagtaataaagaatatcttttcggcatttcgtacttcggaaaaggggatttcaacatactcatggcaagggcctctctaccgaatgcatcccgagatactcggagacttagcatcagcaattcaatacccgcacgaccccagggttagaactccgggctcaacaagcccctacaaggcaactccgagctcatgaggagcggtcttcaagcttaaacaaattatatgactcagagactgccattgatcgtcatatgctggaaaaatcgaaactgtgagacccctagcaggcagcctcaacgtaaccagatctattatatattacacaaactataagaccttaacaggcatgataaactgtaagacctcaacaggcatgacaaactataagacctcaagaggaatgattaactgtaagacctcaacaaacatgaaaatcctgaagtttaggttatacgtcgcatgtgtaaaaatccctaaagggcataccctcggtgtagacacctaaactatcaatcgggattaaaaatggctacggccaaacgcacatgactatgatcaaaacggttaatacagccaaaataacatgactcggggacacccgactgttactaaaatctcaggacactactccaaatatacttcgaaaagaaccggttaaaatagggttcccttaacaggcaaaaacgaaccccgaccatgtcgactccaaaccgccaaagtgttgatctactcaacctacgagctatgaaccttttgaggtgctcaaaacatcgccgacaacgacttgaaatcgaagttcctctagaaccgaagacgggtcaagcaaaaatattccaaaagaccttaacgagcagaaaacaaagcctacaaaaaagcccacaggcaaaaacagcgtaagagccattgtcgccatctaagcaagcctccgggccatatattaaaaggtctctacgaccaaacagcgtaagagccattgtcactagctaaaatttgacaacttgaggattaaaatgagctcaaatcgtaacccggttcagagatcggatccaaaatagttaactatgcaaacctccgagccacatattgaaaggtctcaacgaccgaaatagcgtaagaggcactatcgtcagtctgaaaaccagaggtacttaagggtcaataaaagatcaagtcacaacgcgactcggaggcttgacccggaataattaaactacaatatgcctaagggcacgacataaatgccactatcgccagccgagcaaatctccgggccatgtgccagtaaggtcatttcgacccggagcacaaaaggccatcatcatccgcctatgcaggcaggaaagagcttgagggtcaattgaagctcgagtcacagtacgactcggagactgaatccaaaatagtcgaaacggcaaatgcccaagagcaagaaataaaaataattaatgcctgcccgagcgggcataaaagattcaagggcaaaaggcttgagacgaagcccgactcagagactaagcctaaaacagtcgggccaagcatggaggccccagcaccagctcacgtaagggattacacttaagagcccctaggtctatccgaccagttccggacctacgaggatcccgccaaacaccaaaaccggcctgcccagtcgaaaagcaataacaaaaaagaggtacagaaaaaataaagcttcaagtttcttcctacatattatatgcgcgaaaagggcgcattctccatctacaagcatgctctacatatatcagaaacaaagcgacaaaatggcgaaatctacactccgcactaaagggctacaacttgtcaaattctccctccgcgacgtcagcaagaagttacagagcgtcgcgctcatccacccttgctcgagccaattctttcgagagaacgaagccccgtacactggcctcctcgagtacctctctccgagatctgcaacgaacatactcctcgatcctcttctcccggtcgagggctcgctttagctcagcttgggcatcagcaacatccttcatatgaatcgccatctcctgatcagccttggtccggcttagcgccactttagcctgggcattaattatctcagctctgaccttcaagagatcagattcgagtttcccaatcatgtccgcttgaactttggcgttatcacgagtcaagcagagttgggcctcgatggcagggaccctggctgaggcacatatctcctctaaagctcaagcttgctcttgagcccttagctccccacaaacaactctgacgcggttgacgtcgcctttgaggtactccaaggcctctgcctttttttgcagctgatataacaaaaggggtgagccttaaggttagagaggagcaaagcgcatactatataaagttacctgctctatcaaacaactctcatagtttgagctctgatacgcctcatatcgccaacgtgccaacttagccccattctcttggctaaggagcctaaaggactcgccatcgttcaagaatttctggagcctggccccttgacagagcagcttagacataagcccatcacaggcctatgcaaggaaaactcaataaagggaggagggcgtgacatacaggaaaaaacgcgcctaaactcacctcgaagagaagccgatggacttcctctaagccagaacacattcctgttgatcctgcctctccggccccaggagaaccaacctcgggcagagcatattcactcggaggaatcgccgcccgggaatctgatactccgggaacatcaggctcagacgatgccctctactcaaagatctgagcccgcccaatgccactaaaagctccatcacaccgcgggtgccgatcccccttatcaccatcctccctcggcttggaggctgacgactctttctcctcttcggaagaacactgtctcatcccaaacaaccgccctgtatctacaaacggtgaatccagtacaaatgaaaggggaaaatattacctcgaatatacgaaggccaagtcaaaggcaacatacgcacataccttggtatttcactccccatttggtacgaaatacagctcgccacctgcgctcgtcgcaagtcgaatgggtcgccaacttatggacccagacgggaaggtcaaggactttgcccggcatccacgaagttgctgcaacaaggtagacaacattattactcaactgattttcgctataggcaaaatttaaaaaagcgccagacactccactcacgtgcatgattccacccttcaggaaatggcaaaagccctgttgggataatgtcagcagtttgagcctgaataaaccaactggcccactctcggtccttgtcttcttcatcatcgacaacaaagggcgtggacaaacggcacctcagagttagcaggcctcgataatgaaatggccggtatagtctaacgaggtgattaaacgtgaattcgagcccaaccttctccacgaagaacctcattatcattaccattcgccgaaacgatggataaatctgcgccagagtaactcgatacttcaagcaaaaatcaagcacaaccctagcaggggggccaaatgcgaaagggtataggtatacgctcaaaactccatcagtggagtctgtaatacccttatttggagaaagcacctgcagtgttaccccctcgctccacccgcagtaattcctcaccat

SEQ ID NO: 26 - DNA, 918 bp, Nicotiana tabacum
atgcggaggagtagaagaacaagcaatctcttccctcttgatcctgaaattgaaagatcacttcatagagagaggaaggagttggaagctagatacaaaacagaaagagagttgggcattttagttcaaccacagccaatagtgatggcaggtaatggagggcgttcggtgatagaagctcgaaggccaaatcttgctaatatgactcaggctattgttaagcctgatatcactgattactttgagcttaaacagtacacggtacagctaattcagtccactaggcaatatgtaggtctatctcatgaagacccgcagaggcacattcagaattttttggaaatcacggatacttacaactatccaaatgtttccaaggactatgtcaggctaaccttgtttcctttttcattgttgggggaagctaaagaatggttgcagaaggagcctgctaattcaatccatacttgggatgatttatcaaagaaatttttaatcaagtttttccccactaaaaagacaaagcctttgcggagccagattcttgggtttcaacaacgggatggtgagactcttcgccaagcttgggaaagatacaagaaactactccgagactgtccacatcattgtcaaactgatgaattattgggccatacttttgttgatggattagatgagacttcaaagatgaatcttgattcagcttgtggacgtagttgcatggcgagactatatagtgaaatacaacttttgctaaacaacttcactgttaatgatcataattggcaaggtgagggagaaccaaggagagcaatgaaacagaaagcagcaggggtacttgaacttgatgatttttcagccatgagagcagatatagcaaaattggcaaatcaaatgaatagaatgacaatgaactag

SEQ ID NO: 27 - DNA, 6603 bp, Nicotiana tabacum
tcatctgctcggggaatcatcctcttcctcttgggaggcctctgggactgctctagctgagggtgagatgttggcacagggtcttgtagcaataaatccaaagcgtctttctgccttcatcctatcaaccttaaccctcaactccttcacggactccttggaagcccgcgtctttctcatcttcttggcctccctagcaagctctttgagagcttttccatatgactccacagcgtccgtaagaaatttttgagtgtcaagaatttttttctagttgtccagaatatccttgagggcatcctcatagactgtaggacctgtagaggtggaggtgtcgactgagatgctactgcagtagtgagggcaaacaacttagaggaagctgtctgcatccaactgttgatgctaagaagggtctggcttagacattgtgcagtcactggatgagccgaggtagagggtatctctagagctgctaaaatggatggaccagggtggatgtccattgaggtggaggcaagatgagtaggagccactaccacaactggctcttcagacttgccagttggatcagtggatgttcccttgtagttcttgcctttcgggttgtcatcaccctgtatgttataccatgagaacggggcctttgcttttaccttgatatcaaatggccgcttttcaactttgcggtccctaaagtacatggtcaagaagctagggaagggttagttctatcaccttcactaactacctgtgtaatcacccgagacatcaccttcccgacgttaattgggtaccctaccatgattgatgctaccaatactgcccggtgaagagggagtgagttttcatgagtagtggggtccaatctgctacacacaaatgtttcccaccccttggcctcgaaattcaaacttcttatcaaaattttcactcccgcattcaaccaatcgggggtgatacctgggtttgccagatactgtgccaaccaaggacagacctcctcacctaattccatcttttccaaatacagcgactcatccttctcatcgaagtccaagtagtcatttattgttttcctatcaaacaacactttcaaattgcacaccttggtcactttggtgcccttcttgatgtgggcaacattggtgtagaattccttgactaggtgctcgtttgcatcctcacaattgtttaagaaatactcccagcccactctatctctaaattgccttctcacattggggttgtgaggcaaaaggtttctatctacaaaaattctctccgaaattaatttcctcacaggccaccattctttgaatttatggtaggccacctcactcacaaagtggtcttgccacacctccggatttctagttcgttctaccctaccaacctggggctgacccccttctcctactacctcttcttcccctactacaccctcttcggataatgaagttgtgggagaggtggagtattcatccccactaccttcagctgagccctcagacgaaccagaagatacatttactgacgcttggacagtggggaaaggtggaagagtgtctcttagtctgtttctctccggccagtcagggatgtactctgggattgagtctgaagatatatctcgggagggctcgtattcactcccagactggtcaatggacctatcagcagctttagtgagcttccttgtgtttttaatgttttgtcgggcttggggagtcaatcttagcatcttctgtttccctccccgggaggactctcccctgcctggttgtttagaacccttgcctcttgtttcaccattgtctgcaaacaacatccattagacttgttagtatcagtagaagaaattaagttcacaattgtagaaaataaaaagatgcagacagtagcagatgttgcacagtgcggaccgcacaaaatataaagcggtcgcatagaggccaatgcggaccgcacaaaaatgctaatactgtctgcatagaggtggtgttcagactacccactctctgaacaattgcaccacggaccgcacaaaatggtaatgtggtccgcattgaggcaccgtggaccgcacaaaatacaaggcggccgcggtggcaaacttcagagagctagtattttcatcctttatcaatgcggtctgcactgattttgtgccccccacactgagttatttgcggccgcacacaatgtagtgtggtccgcattgaaaacttcagagacttgaataatttttccaccatatgccgcactgcataaacacaaacatgtaacatctcacaaccggtcaacctaaaaataaatcctatattacaatgaaaatcaaagaaaaacaagaagaaaaacacatgggttgcctcccaaaaagcgtctgatttaacgtcgcagcacgacgcaagttaccatcaaatcatttgagatgaagaagtgccaccatgtggctatcatcagttttgccgaagtagtgcttgaccctatgcccattcactctgaaaacttccccatttttgttctttaaatcaagtgcaccaaacgggatcacacataccacttcaaaaggtccactccatttcgacttaagcttttccggaaacagacgtaaccaagagttgaacaagagaaccaaatcacccactttgaaatccttactacgagcatatttatcatgaaggtacttcatcttgtccttgtacaaggaagaactggagtaggcatggaatcgaaattcatcgagttcattaagctgctccacacagagattggctgcaatatcccattcaagatttagcttccataaggcccacatggccttgtgctctaactcaaccggtagatggcaagctttcccaaacaccaaccgatatggaaacataccaatcggagtcttgtaagaatcttataagcccatagagcatcatccaacttctttgaccaatcgatcctataagcattgaccgtcgttgacaatatctttttgatttccatgttgtagacttcaacttgaccacttgcttgaggatgatagggagtagaaactttgtgattgacaccatactttgcaagaaaaatgtcaaaagctctattgcaaaaatgagaccccccatcacttatgattgcacgaagagtaccaaaccttgtaaaactgctcttcttgagaaatgcaacaacactctgcgcctcatagttgggaaaagccacggcttcaacccactttgaaacatagtccaccgccacaaaaatgtatgtgttcccacatgagctaacaaacggacccataaaatcaatgcctcatacatcaaaaatatccacctcaaggatggtattgagaggcatctcatctttcttcgaaattccgccccctctttgacattcgtcacacctctttacgagttcacttgcatctttgtacaaagttggccaataaaatccacaactaagaactgtggaagtcgtcctcgccccgccattatggccaccatagggagaggaatgacaaacctccaagatactcaatttctcttcctctgggacacaccttcggatcacaccatccgtgcaaatcttgaacaagtatgtctcataccaatagaaatccaaactatctcgcttgagcttcttcttttggttagaagagagctcacacgggattataccagtcacaaggaaattagcaacatctgcaaactatagcattccattcatcgacaccgaaaggagttgttcgtcgggaaatgaataattgctttctaggccatcacgaggcctcccctcctcctcaaagcttgaagtaacaagacccatcgcatcagtctagctttggaatccttcttcgtcatcaagtatcggagtgcggcatgatcggtatgaataataaccttagcacccatgagatacggccgaaatttttccattgcgaacacaatagacaaaagctcttgcttagtcaccgtgtagttcacttgagcatcatgcattgtcttgctcgtatagtacaccggatgaaacattttgttcactcgttgacccaaaaccgctccaaccacaacgtcgctcgcatcacacatgagctcaaagggcaagctctaattaggtgcggtaatgataggagtggtggtcaacttatgcttgagaagttcaaaggcttgcatacatttttcatcaaacacgaacttggcatctttttctaacaacttgcacaaacgattcactaccttcaaaaagtctttgataaatctccggtagaacccctcatatccaagaaaacttctaactccattgatagatgtagggggagggagacctgaaatcatatcaatttttgctttgtctacctcaataccatgctttgaaattttatgcccaagaactataccctcttccaccataaagtggtatttctcccaattgagaacaagattggtttcttcacaacgggccaaaactctatcaagattcttcaagcattcatcaaatgaatcacccacaacactaaagtagtccatgaacacctccaaaatgccttccaccatatcggtgaaaatggccatcatacaccgttaaaatgtagccggtgcattacacaatccgaaaggcatcctagaaaaaaaaatgtgctatatggacaagtgaatgtggtcttctcttgatcttctggagcaatcaagatttggttgtacctagaatatccattcaagaaacagtagaaggcatgcccagcaggtcggtctaacatctggtcaagaaaagtcaaaggaaagtgatccttgcgggtcactttattcaacttgtggtagtccatgcataccctccaaccagtgatggttatggtaggaattaactcattttgttaatttgcaaccagggtcatgccacccttcttcggtatacattgcaccggtgaagtccaagagctatcagaggtggggtacataacccctgatcacctcctttttcacaacttcttgcattgcctggttcaacttcctttgatgctccaaggagggctttacatcatcttccagaataatcttgtgcatacaaaatgtggggcttatcccccgaatatcagctaaagtccatccaattgcctttttccacttttgaagcaccgctaattggcatcaacatgcatgttagtaagacaagaggaaagaataactggcaaagtagagtttgagcctaagaactcatacctaaggtgtgaaggaagtggtttcaaatccaacaccggaggctcctcaattgaaggctttgttggtggagtcttcctattctcgagatccagagatagtttcctaggttcataagagtaagagcccatcccatgtaaagcattcacgcactccactcggccctcatcatcattgacatcaagattcaacaatacggcctccaatgagtcctccacattgatcattacactggtgtcatcaattatcactattgtgacgaggtccataaaagagcacactttggtactgttgggctgtttcattgacttgtaaacatgaaagaccactttttcatcacccacccgaaaggtgaggtcccctacttccacatgaactaaggccttcccggtagcaaggaaagatctccccaatatgataggaacttcataatccacctcacagtccaagatcacaaaatcagctggcaagataaatttgtccacccggataaggacatcatcgataatatccaatgatctcttcatcgttctatccgccatttgtaatctcatggaagtcggcctaggttgcccaatacacaaaattttgaaaaccgagtaggaatcaaattgatactagcccccaagtcacatagagccttggcaaaatccgcactcccaatggtgcaaggaatggtgaaagcaccgggatcttcaagattcgggaccattgattgcactattgtactaacttggttagtcatttttatagtttcacaatccatagaccacttctttgtcaccaagtccttcatgaattttgcatagcccggcatttgctcaagagcctccaccaaaggcacattaatggataagctcttcatcatgtcaatgaactttttaaactgattctcaattttctacttatcaagactttgaggataaggcggaggtgatcttggaaaaggtaccttggctttaggcaccaccagctccgacatatctattacgtgttccctagacgggttcacgtcattttgagtttccacctcggcatcttgaatatcaatcatcacttcttcattcatattgtcatctatcacattttctacaaccaaaggaacttcatcttcttgcaactcaatatcatcactcaaaacttgcttttgtttagaggcattcacatcaccgcctcgtccactccttgtagttactgccataacatgattgttctcaccctttgggtttactactatatcacttggtagagcacccttagggcgtgtattcaaggactgagagatttggcctatctgaacctccaaatttctgattgaggtattgtggaaagccaactgtgcatcagaatctgcatttttcttcatcatctgttcgaacatcatttcaattctacccat

SEQ ID NO: 28 - DNA, 5379 bp, Nicotiana tabacum
  modified_base (1428)..(2569): a, c, t, g, unknown or other
  misc_feature (1428)..(2569): n is a, c, g, or t
atggctgatgtagcagtgaattttctggtagagaatttgatgcagttgttgagggacaatacagagctaatatttggagtgaaaggtgaggcagagaatctgcttcaagatttgagtgagttcaatgcgtttctgaagcaagcagacaagtcccgcagcgataacgaagttctaaaagaattggtgaagagtatcagaaaagtgacgaatgattctgaagacgctattgataagtttgtaattgaggcaaagcttcacaaggacaaaggggtaggcaggtttgtggacattgcgcattataaaagagtgaaagatgtagcccttgagattaaaggtatcagagatagggtgaaagaaatccgtctgaacaatgcacatggccttcaagctcttcaagatgatgatccatccaacagaggcgtggaagacagaaaggtacctatattatatatgccttcaatcattcattttttgcccttaatttgcgccgaacccgctcggaacactttagctccgcccctgcctgccatgtttgttgttggtatcatgtaaaattttagcatgtaactcaacaccacaagtcaatgagacaacgaatgcagtaacccagctagggctatgcatcagtcgggtcggatcggatcagatcgaatttaacacatttcgaattgtaaattcggattccgatttttataaaatgcaatccgaatccaatccaaattaaattggatcggattggattttaaagtttgaatcgggtaaatatttcggattttcgaatcagatagtatgccttattaaggctactaacaatctaatcggctactacactttataaggcttaaattgaaaggcaacaaatgtcttttatagcaatagacaaaacaaagctccatagcaaaataaaataaactaaaattccaaacaaatgttatctcggctgggaatcaagccccaactcagagctgtgggccaggttgctttgctttatcggatcaatcagtatgcggtgggcaagctctttcccaagtcgctgagctgtttaacagagggaaggaaaaagaaatgacaaaacaaaaactacaaaggaaaaagaatcgaatctcgctcattttcaggtaagatttacttagctcgctccttgctcgcgaagcggcataccaataaaaagaaaagcgttatcggatttccatcgtcgttgtccgtcgataggaaggagatactgagaatgagagacacaaagataagacttaagagaagcgaactaacaagtgaggcttgctcagttgataaaagcacctctacccacgaccgttaggtcctgggttcgagtcatgctggaggagaagggtggaaacactatagatcctcctaaattgggagggatattaaaaaaaaaaaaaaaaaaaagagaagcgaaaagagcannnnnnnnnnnnnnnnnnnnnnnnnnnnnnnnnnnnnnnnnnnnnnnnnnnnnnnnnnnnnnnnnnnnnnnnnnnnnnnnnnnnnnnnnnnnnnnnnnnnnnnnnnnnnnnnnnnnnnnnnnnnnnnnnnnnnnnnnnnnnnnnnnnnnnnnnnnnnnnnnnnnnnnnnnnnnnnnnnnnnnnnnnnnnnnnnnnnnnnnnnnnnnnnnnnnnnnnnnnnnnnnnnnnnnnnnnnnnnnnnnnnnnnnnnnnnnnnnnnnnnnnnnnnnnnnnnnnnnnnnnnnnnnnnnnnnnnnnnnnnnnnnnnnnnnnnnnnnnnnnnnnnnnnnnnnnnnnnnnnnnnnnnnnnnnnnnnnnnnnnnnnnnnnnnnnnnnnnnnnnnnnnnnnnnnnnnnnnnnnnnnnnnnnnnnnnnnnnnnnnnnnnnnnnnnnnnnnnnnnnnnnnnnnnnnnnnnnnnnnnnnnnnnnnnnnnnnnnnnnnnnnnnnnnnnnnnnnnnnnnnnnnnnnnnnnnnnnnnnnnnnnnnnnnnnnnnnnnnnnnnnnnnnnnnnnnnnnnnnnnnnnnnnnnnnnnnnnnnnnnnnnnnnnnnnnnnnnnnnnnnnnnnnnnnnnnnnnnnnnnnnnnnnnnnnnnnnnnnnnnnnnnnnnnnnnnnnnnnnnnnnnnnnnnnnnnnnnnnnnnnnnnnnnnnnnnnnnnnnnnnnnnnnnnnnnnnnnnnnnnnnnnnnnnnnnnnnnnnnnnnnnnnnnnnnnnnnnnnnnnnnnnnnnnnnnnnnnnnnnnnnnnnnnnnnnnnnnnnnnnnnnnnnnnnnnnnnnnnnnnnnnnnnnnnnnnnnnnnnnnnnnnnnnnnnnnnnnnnnnnnnnnnnnnnnnnnnnnnnnnnnnnnnnnnnnnnnnnnnnnnnnnnnnnnnnnnnnnnnnnnnnnnnnnnnnnnnnnnnnnnnnnnnnnnnnnnnnnnnnnnnnnnnnnnnnnnnnnnnnnnnnnnnnnnnnnnnnnnnnnnnnnnnnnnnnnnnnnnnnnnnnnnnnnnnnnnnnnnnnnnnnnnnnnnnnnnnnnnnnnnnnnnnnnnnnnnnnnnnnnnnnnnnnnnnnnnnnnnnnnnnnnnnnnnnnnnnnnnnnnnnnnnnnnnnnnnnnnnnnnnagagagagacttcgatataaactaagaaaaaataagtctaaagagagtggatgggttcggattctcggatatccgatccaaatgcacagccctaaacccagcattgcatttatatatatatatatatatatatatatatatatatatatatatttaacaggtttagactccttaataagaatgaaggtgagtaagattagatgacaatatgctgcttaaatataaccaattcagatgtctccattgagcctccagcagaatataatggtacaatcaacggaactgtattgcacttaaatatactttgcacaggaagatactcctgcgcaaagttcatagaatgattatcaattttatatgagaagccgacataatcaacaaaatgagtatcgtaaaaatgtgaaagtaagaaggatgtgtggcatttcttggacaatatctatattgttgtaatgttagtgttctatatatgtcttgggaaaatccacctttgcttctatttactactgagtatcaatttttccaatacaaaacaaagctaatcacctatcttttaattaagctgcacaaatgcgtacgtaatacaatatgttttggttgaatataatgtttcttttcttgccaatgaacgttaacttcatatatatgtctaatcttcatctttgatattaatttaaaagcctcccgtggttgaggaagatgatgtggtgggctttgatgaggaggcacagaaggtaatcgaccgtcttcttgacagatcagatgaattagaggttattccagttgtaggaatgcctggtcttggcaaaaccacactagcaactaagattttcaagcatcggaaggttgaatacgagttctttactcgagtttgggtttatgtctcgcaatcatacaagacaagagaattatatctcaacatcattagcaaattcaccggaaaaacaaaacaataccaatatatgtgtgggaacgtatcaagattgctttcccgaacaacaaaaagtgcaatagagtattgttgaccactcgagatcacaaggtggctcatcattgcaacaatactccacatgatttaaaatttcttagcgatgaggaaagttggatgttgctagagaagaaagtttttcacaaggctaaatgtcctccggaattggaaagacctggacagagcatagccaggaagtgtaagggacttccccttgcaattgtggtgattgcaggagctctaatagggaaacgcaagacaacaagggagtgggagcaagtggatcagagtgttggtgaacacctcattaatagaaaccagccaaagaattgtaataaaattggtgcaaatgagttatgatcgtttgccttacgacttgaaagcatgctttttgtattgtggtgcatttcccagaggctttgagatccctgcttggaatttgatccgtttatggatcgccgaaggcttcatccaatacaaagggcccttatcccttgaacgtaaagcagaggattacttgaatgatctcgtcaacagaaacttagtgatgataattcaaaggacgtctgatggacaaatcaaaacatgtcgtgttcatgacatgttgcatgagttttgctggcaagaggccacaacagaagaaaatcttttccaagaggtaaaattaggtgttgggcaatttgctcgtgagatacagcaactatccacctaccgccgcttgtgcattcattcctcagttctggaattcatttctatgaagccctctggtgagcatgttaggtcattcctatgtttttcttcagaaaaaattgacatgcccccggttgacatcccaaacataccaaaagactttccattgctaagggtgttggatgctgaatccatcaaattcagttgcttttgcagggagtttttccaattgtattttctgaggtatattgctttctcatctgactttatcaagatccttcctaaacatattggggaactatggaacgtacaaaccctcattgttaacacacaacagagcaatcttgatattcaagcagacatatggaacatgccacggctgaggcatctgcacactaacacgtccgctaaattgcctacgcctgttgccccaaaaagtagcaaggttacctcggtaaatcaatgcctacaaactctctccacaattgcaccagaaagctgcacagaagaagttttttcaagggctccaaacttgaaaaaactgggcattcgtggtaaaatctttatgcttctggaaccaaataagtccgaattgttcaacaatgttaagaagctacaatgtcttgagaacttgaagctgataaatgttggtcaaagtgggaaacaattacgccttcctccaacatatatatttccgacaaatttgaggaagctaacattattagatacctggttggagtgggatgatatgtctgtattgggccagttagagtaccttgaagtcttgaagctgaaagacaatgcatttaagggagaatactgggaaccaaaagttggaggttttcgttccctactagtgttatggatcgaaaggtcagatttagcttcttggaatgcttcaagtgatcactttccaagacttaagcgtcttgttctcgtatcatgtgataaacttgaggaggtccccattggcttggctgatatacgcggcctccaagttatggagttgcgaaattcaaccaagcaaacagcaaaatctgcccgggatatacaggccaaaaaagacaagcaaactcaagaaggggctaaaacccaaaggttcaagctttctatattccctccttatctctga

SEQ ID NO: 29 - DNA, 5544 bp, Nicotiana tabacum
atggatctggtccatcaagatgaagatgtgactgctgaactggaggttcagactcctaagcccaagaaatccaagactttctccaagaagtctacttctatgtcaaagtctgctgaactatccaccctggcaaaaaggaccaggtccacagtgaaaaccatacaagcaaaagttactgaaggagaggcgtggagtagtgaagaggaagatgaatcagacagtgaaaaggacaagatggctaagtttggcaaaagaactattctgaaggtgctagatggaagggatactagcttagtgaaaggggtgcaaatctcttttgatatgaaggagttgggtggaattctaggtgtacatgatgaagggtacaataattacaaaaagcttaagtggcaaagcctagaaaattttcctactgcccttgccatcaccagaaaattcagtgatcatgagaaggaaagtgtgcccaagactgtgtacaagagtgaaatgaagtcaccccacaaggttttgtttgaatttgtcatcaaatatgttctgcctagggttatcaatggtaccaagtctcattctattccctatggtttcattcttacaactgtgctttcttgttttaaggtgcctttgaataagtgtgaggtggctacaagcaaagatcactttggggcgaaaactttgattgcttgtgactatgaggaaagtgaggcaaaggaagctaagatagcaaggatgaagacacggttggctgaggtagaatctgagagagatgctctcagaacaaaacttgcaagacaaaaggagaagaatgatggaatttttcaagacatgctgaaacttctccaagaaaataacccagcacctcgttcttccaagcctaaagttcctagcctagtgtggatggtgttgcgtgtggcagtgttggtggggagagataaggagaaagtagatggtggtgaaaggtgttccatgtctgcaatgtgtgcatatctaatagagccccgagggctcgggagtgattcagaggcggttcggggtgtttttgaccttaggaagtgttgcagaatttctgcagtcagtgcccagtcattttcttctatgcgatcacatagatccaggagcagcttttggacctcagcagtaggatttgatcgggagctgacttcagtccagagacaccgaggtagccttgctgacagggggcgaggccgtgccagaggccgaggcaggggcagagctcagccccgagcagcagttccagaggtggagcctcatgttgattatgatgaggaggttccagctccagcagctccggtgggcccagctcaggtcccagagggtttcattgccaccccagttcttcaggacgccctggttcgattggtgggccttatggagagagtcacccgaacaggtttgcttcctgtagcaccagccacttctcaggctggaggaggggctcagactcctgctacacgcactccggagcaggtagctccccagattcagactccagcggttcagccagttggggtagttcagccgggtgccatagctcagaccggcgatggagcggctatgtccgccgatgctttgtggagactggataggttcaccaagctcttcacttctacttttgccggtgcatctactgaggatccccaggattatctagacagctgccacgaggttctcagaaacatgggtattgttgagaccaatggggttgattttgctacatttcgcttgtctggatccgccaagacttggtggagggattattgcttagcgagaccagccggatcgccatctttgacttgggagcagtttacagtgttgtttctagagaagtttctccccgttactcagagagaggcctatcggaggcagtttgagcgcctccagcagggttctatgactgttacccagtatgagaccaggttcatcgatttagctcgccatgctctcatcatacttcccaccgagagagagagggtgagaaggtttattgatggtcttattctgccgattcgtcttcagatggccaaggaggccgggagcgagatcacatttcaggaggcggccaatgtggcccgcagagttgagatggttctgtcacagggaggtggtcatgggtcggataagaggccccgtcattcaggcagattcagtggtacctcgtctggaggtagagattcgtatgtccttcagtgcaccaccagctcccatcagtgcaccgccgcttcagagtttccgaggtggtcattcaggcgacagggtcagcagtctcagcagccgagggcttgttacacttgtggtgatatgggtcacattgccaggttttgccctcgagcttcgggtagttctcagcagcagggtcctcgtcctatgattcaggcaccagttgctccacagcctgcccagccagctagaggcgggggtagaggacatagaggtggaggtagaggtcatagaggtggagctcagaccgccagaggtaggggtcagccagcagccgatcgtcccagggatgtgattcagggaggtggggcccagccccgatgttatgctttgccagccaggccagaggctgagtcatccgatgttgttattacaggtactattttggtctgtgatagagatgcttcagtgctatttgaccctggatctacgtattcatatgtgtcgtcctattttgcaccctacctggttatgcctagtgaggccttgagtattcctgtgtatgtatctacaccagtgggtgattctatagtggttgatcgggttcatcgttcctgtgttgtggtgtttaggggacttgagacccgtgttgatttgttgctcttagatatggtggatttcgacgttatattagggatggattggttgtccccgtatcatgcgatcttggattgtcatgccaagactgtgactttagccttaccggatttgccccttagagtggagagggagactcccctgttatttctatccagtatgggcagtcttgcttatattccggtcggtgagagaccgcttgctttggacgttcaggctttggccaatcagttagtgaggttggatatttctgagcctagtagagtattagcttgcacggtcgctcgttcttcgttattggagcgtatccgtgatcggcagtttgatgatccccatttgtgtgtccttagagacacggtacagcgtggaggtgccaagcaggagccccgagggctcgggtgtttgtttcggaatggttttagacttagaaaaattgcagaactgctgtctgctggtgtccagtcttttgtgctatgcgatcgcatagctatatccaggagcagcttttggacctcagcagtaggatttgatcgggagctgacttcagtccagagacaccgaggtagccttgctgacagggggcgaggccgtgccagaggccgaggcaggggcagagctcagccccgagcagcagttccagaggtggagcctcatgttgattatgatgaggaggttccagctccagcagctccggtgggcccagctcaggtcccagagggtttcattgccaccccagttcttcaggacgccctggttcgattggtgggccttatggagagagtcacccgaacaggtttgcttcctgtagcaccagccacttctcaggctggaggaggggctcagactcctgctacacgcactccggagcaggtagctccccagattcagactccagcggttcagccagttggggtagttcagccgggtgccatagctcagaccggcgatggagcggctatgtccgccgatgctttgtggagactggataggttcaccaagctcttcacttctacttttgccggtgcatctactgaggatccccaggattatctagacagctgccacgaggttctcagaaacatgggtattgttgagaccaatggggttgattttgctacatttcgcttgtctggatccgccaagacttggtggagggattattgcttagcgagaccagccggatcgccatctttgacttgggagcagtttacagtgttgtttctagagaagtttctccccgttactcagagagaggcctatcggaggcagtttgagcgcctccagcagggttctatgactgttacccagtatgagaccaggttcatcgatttagctcgccatgctctcatcatacttcccaccgagagagagagggtgagaaggtttattgatggtcttattctgccgattcgtcttcagatggccaaggaggccgggagcgagatcacatttcaggaggcggccaatgtggcccgcagagttgagatggttctgtcacagggaggtggtcatgggtcggataagaggccccgtcattcaggcagattcagtggtacctcgtctggaggtagagattcgtatgtccttcagtgcaccaccagctcccatcagtgcaccgccgcttcagagtttccgaggtggtcattcaggcgacagggtcagcagtctcagcagccgagggcttgttacacttgtggtgatatgggtcacattgccaggttttgccctcgagcttcgggtagttctcagcagcagggtcctcgtcctatgattcaggcaccagttgctccacagcctgcccagccagctagaggcgggggtagaggacatagaggtggaggtagaggtcatagaggtggagctcagaccgccagaggtaggggtcagccagcagccgatcgtcccagggatgtgattcagggaggtggggcccagccccgatgttatgctttgccagccaggccagaggctgagtcatccgatgttgttattacaggtactattttggtctgtgatagagatgcttcagtgctatttgaccctggatctacgtattcatatgtgtcgtcctattttgcaccctacctggttatgcctagtgaggccttgagtattcctgtgtatgtatctacaccagtgggtgattctatagtggttgatcgggttcatcgttcctgtgttgtggtgtttaggggacttgagacccgtgttgatttgttgctcttagatatggtggatttcgacgttatattagggatggattggttgtccccgtatcatgcgatcttggattgtcatgccaagactgtgactttagccttaccggatttgccccttagagtggagagggagactcccctgttatttctatccagtatgggcagtcttgcttatattccggtcggtgagagaccgcttgctttggacgttcaggctttggccaatcagttagtgaggttggatatttctgagcctagtagagtattagcttgcacggtcgctcgttcttcgttattggagcgtatccgtgatcggcagtttgatgatccccatttgtgtgtccttagagacacggtacagcgtggaggtgccaagcaggtacttccttcttatgtccgttcgaggacgaacggttgttttagaggtggagaatgtgacgacccaaagggtcatcaccggttttctccctttttcgtgcttccgaggccttga

SEQ ID NO: 30 - DNA, 4017 bp, Nicotiana tabacum
atggagagagtcacccgaacaggtttgcttcctgtagcaccagccacttctcaggctggaggaggggctcagactcctgctacacgcactccggagcaggtagctccccagattcagactccagcggttcagccagttggggtagttcagccgggtgccatagctcagaccggcgatggagcggctatgtccgccgatgctttgtggagactggataggttcaccaagctcttcacttctacttttgccggtgcatctactgaggatccccaggattatctagacagctgccacgaggttctcagaaacatgggtattgttgagaccaatggggttgattttgctacatttcgcttgtctggatccgccaagacttggtggagggattattgcttagcgagaccagccggatcgccatctttgacttgggagcagtttacagtgttgtttctagagaagtttctccccgttactcagagagaggcctatcggaggcagtttgagcgcctccagcagggttctatgactgttacccagtatgagaccaggttcatcgatttagctcgccatgctctcatcatacttcccaccgagagagagagggtgagaaggtttattgatggtcttattctgccgattcgtcttcagatggccaaggaggccgggagcgagatcacatttcaggaggcggccaatgtggcccgcagagttgagatggttctgtcacagggaggtggtcatgggtcggataagaggccccgtcattcaggcagattcagtggtacctcgtctggaggtagagattcgtatgtccttcagtgcaccaccagctcccatcagtgcaccgccgcttcagagtttccgaggtggtcattcaggcgacagggtcagcagtctcagcagccgagggcttgttacacttgtggtgatatgggtcacattgccaggttttgccctcgagcttcgggtagttctcagcagcagggtcctcgtcctatgattcaggcaccagttgctccacagcctgcccagccagctagaggcgggggtagaggacatagaggtggaggtagaggtcatagaggtggagctcagaccgccagaggtaggggtcagccagcagccgatcgtcccagggatgtgattcagggaggtggggcccagccccgatgttatgctttgccagccaggccagaggctgagtcatccgatgttgttattacaggtactattttggtctgtgatagagatgcttcagtgctatttgaccctggatctacgtattcatatgtgtcgtcctattttgcaccctacctggttatgcctagtgaggccttgagtattcctgtgtatgtatctacaccagtgggtgattctatagtggttgatcgggttcatcgttcctgtgttgtggtgtttaggggacttgagacccgtgttgatttgttgctcttagatatggtggatttcgacgttatattagggatggattggttgtccccgtatcatgcgatcttggattgtcatgccaagactgtgactttagccttaccggatttgccccttagagtggagagggagactcccctgttatttctatccagtatgggcagtcttgcttatattccggtcggtgagagaccgcttgctttggacgttcaggctttggccaatcagttagtgaggttggatatttctgagcctagtagagtattagcttgcacggtcgctcgttcttcgttattggagcgtatccgtgatcggcagtttgatgatccccatttgtgtgtccttagagacacggtacagcgtggaggtgccaagcaggagccccgagggctcgggtgtttgtttcggaatggttttagacttagaaaaattgcagaactgctgtctgctggtgtccagtcttttgtgctatgcgatcgcatagctatatggcgaggacacgcgcttcctcatcgaccgcgcagcagcccgagcccccagcagcagctcctattaggggcagagggcgaggcgaggcccagaggccgaggcaggggcagagctcagccccgagcagcagttccagaggtggagcctcatgttgattatgatgaggaggttccagctccagcagctccggtgggcccagctcaggtcccagagggtttcattgccactccagttcttcaggacgctttggtccgattggttcaccaagctcttcacttctacttttgcggtgcatctactgaggatccccaggattatctagacagctgccacgaggttctcagaaacatgggtattgttgagaccaatggggttgattttgctacatttcgcttgtctggatccgccaagacttggtggagggattattgcttagcgagaccagccggatcgccatctttgacttgggagcagtttacagtgttgtttctagagaagtttctccccgttactcagagagaggcctatcggaggcagtttgagcgcctccagcagggttctatgactgttacccagtatgagaccaggttcatcgatttagctcgccatgctctcatcatacttcccaccgagagagagagggtgagaaggtttattgatggtcttattctgccgattcgtcttcagatggccaaggaggccgggagcgagatcacatttcaggaggcggccaatgtggcccgcagagttgagatggttctgtcacagggaggtggtcatgggtcggataagaggccccgtcattcaggcagattcagtggtacctcgtctggaggtagagattcgtatggtagaggccatcctcctaggccctttcagtcagctctccaggtatcacatggtatctcaggtggtcgtggttctcagacgcattatttggatcagcagtccttcagtgcaccaccagctcccatcagtgcaccgccgcttcagagtttccgaggtggtcattcagggcgacagggtcagcagtctcagcagccgagggcttgttacacttgtggtgatatgggtcacattgccaggttttgccctcgagcttcgggtagttctcagcagcagggtcctcgtcctatgattcaggcaccagttgctccacagcctgcccagccagctagaggcgggggtagaggacatagaggtggaggtagaggtcatagaggtggagctcagaccgccagaggtaggggtcagccagcagccgatcgtcccagggatgtgattcagggaggtggggcccagccccgatgttatgctttgccagccaggccagaggctgagtcatccgatgctgttattacaggtactattttggtctgtgatagagatgcttcagtgctatttgaccctggatctacgtattcatatgtgtcgtcctattttgcaccctacctggttatgcctagtgaggccttgagtattcctgtgtatgtatctacaccagtgggtgattctatagtggttgatcgggttcatcgttcctgtgttgtggtgtttaggggacttgagacccgtgttgatttgttgctcttagatatggtggatttcgacgttatattagggatggattggttgtccccgtatcatgcgatcttggattgtcatgccaagactgtgactttagccttaccggatttgccccgtttagagtggagagggactcctggtcattctacccgcagtgttatttctcttgcttatattccggtcggtgagagaccgcttgctttggacgttcaggctttggccaatcagttagtgaggttggatatttctgagcctagtagagtattagcttgcacggtcgctcgttcttcgttattggagcgtatccgtgatcggcagtttgatgatccccatttgtgtgtccttagagacacggtgcagcgtggaggtgccaagcaggtacttccttcttatgtccgttcgaggacgaacggttgttttagaggtggagaatgtgacgacccaaagggtcatcaccggttttctcccttttttgtgcttccgaggccttga

SEQ ID NO: 31 - DNA, 1485 bp, Nicotiana tabacum
atggcgaggacacgcgcttccttatcgaccgagcagcagcccgagcccccagcagcagctcctattaggggcagagggcgaggccatgctagaggccgaggtaggggcagagctcagccccgagcagcagttccagaggtggagcctcatgttgattatgatgaggaggttccagctccagtaactttggtgggcctaactcaggtcccagagggttttattgccaccctagttcttcaggacgccctggttcaattggtgggccttatggagagagtcacccgaatatgttttcttcctgtagcaccagccacttctctggctggaggaggggctcagactccttctacacgcactccggagttcaccaagctcttcacttctacttttgccggtgcatttactgaggatccccaggattatctagaaagcttccacgaggttctgagaaacatgggtattattgagaccaatggggttgattttgctacatttcgcttgtctggatccgccaagacttggttcaacgatttagctcgccatgctctcatcatacttcccaccgagagagagagggtgagaaggtttattgatggtcttattctgccaattcgtcttcagatggccaaggagggcgggagcgagatcacatttcaggaggcggtcaatgtggcccgcatagttgagatggttatgtcatatggaggtggtcataggtcggataagaggccccgtcattcaggaagattctgtggtattgcgtctggaggtagagattcgtatggtagaggccatcctcctaggctcgttcagtcagctcaccagcctgcccagccagctagaggcgggggtagaggacatagaggtggaggtagaggtcatagaggtggagctcagaccgccagaggtactattttggtctgtgatagagatgcttcagtgctatttgaccctggatctacgtattcacatgtgtcgtcctattttgcaccctacttggttatacgtagtgaggccttgagtattcctgtgtatgtatctacactagtaggtgattctatagtggttgattgggttcatcgttcctgtgttgtggtgtttaggggacttgagacccgtgttgatttgttgctcttagatatggtggattttgacattatattagggatggattggttgtccccgtatcatgcgatcttggattgtcatgccaagattgtgactttagccttatcggattttccccatttagagtggagagggactcctggtcattctacccgtagtgttatttcgtatgtgaaggctcggtgtatggtcgagaaggggtgtttggcctactcagcttatgttcgtgattccagtgctgagattccctctattgattctgtgaccttgtcttgcttatattccggtcggcgagagacctcttgctttggacgttcaggatttggccaatcagttaatgaggttggatatttctga

SEQ ID NO: 32 - DNA, 3978 bp, Nicotiana tabacum
atggagagagtcacccgaacaggtttgcttcctgtagcaccagccacttctcaggctggaggaggggctcagactcctgctacacgcactccggagcaggtagctccccagattcagactccagcggttcagccagttggggtagttcagccgggtgccatagctcagaccggcgatggagcggctatgtccgccgatgctttgtggagactggataggttcaccaagctcttcacttctacttttgccggtgcatctactgaggatccccaggattatctagacagctgccacgaggttctcagaaacatgggtattgttgagaccaatggggttgattttgctacatttcgcttgtctggatccgccaagacttggtggagggattattgcttagcgagaccagccggatcgccatctttgacttgggagcagtttacagtgttgtttctagagaagtttctccccgttactcagagagaggcctatcggaggcagtttgagcgcctccagcagggttctatgactgttacccagtatgagaccaggttcatcgatttagctcgccatgctctcatcatacttcccaccgagagagagagggtgagaaggtttattgatggtcttattctgccgattcgtcttcagatggccaaggaggccgggagcgagatcacatttcaggaggcggccaatgtggcccgcagagttgagatggttctgtcacagggaggtggtcatgggtcggataagaggccccgtcattcaggcagattcagtggtacctcgtctggaggtagagattcgtatgtccttcagtgcaccaccagctcccatcagtgcaccgccgcttcagagtttccgaggtggtcattcaggcgacagggtcagcagtctcagcagccgagggcttgttacacttgtggtgatatgggtcacattgccaggttttgccctcgagcttcgggtagttctcagcagcagggtcctcgtcctatgattcaggcaccagttgctccacagcctgcccagccagctagaggcgggggtagaggacatagaggtggaggtagaggtcatagaggtggagctcagaccgccagaggtaggggtcagccagcagccgatcgtcccagggatgtgattcagggaggtggggcccagccccgatgttatgctttgccagccaggccagaggctgagtcatccgatgttgttattacaggtactattttggtctgtgatagagatgcttcagtgctatttgaccctggatctacgtattcatatgtgtcgtcctattttgcaccctacctggttatgcctagtgaggccttgagtattcctgtgtatgtatctacaccagtgggtgattctatagtggttgatcgggttcatcgttcctgtgttgtggtgtttaggggacttgagacccgtgttgatttgttgctcttagatatggtggatttcgacgttatattagggatggattggttgtccccgtatcatgcgatcttggattgtcatgccaagactgtgactttagccttaccggatttgccccttagagtggagagggagactcccctgttatttctatccagtatgggcagtcttgcttatattccggtcggtgagagaccgcttgctttggacgttcaggctttggccaatcagttagtgaggttggatatttctgagcctagtagagtattagcttgcacggtcgctcgttcttcgttattggagcgtatccgtgatcggcagtttgatgatccccatttgtgtgtccttagagacacggtacagcgtggaggtgccaagcaggagccccgagggctcgggtgtttgtttcggaatggttttagacttagaaaaattgcagaactgctgtctgctggtgtccagtcttttgtgctatgcgatcgcatagctatatccaggagcagcttttggacctcagcagtaggatttgatcgggagctgacttcagtccagagacaccgaggtagccttgctgacatggcgaggacacgcgcttcctcatcgaccgcgcagcagcccgagcccccagcagcagctcctattaggggcagagggcgaggccgaggcccagaggccgaggcaggggcagagctcagccccgagcagcagttccagagttcttcaggacgccctggttcgattggtgggccttatggagagagtcacccgaacaggtttgcttcctgtagcaccagccacttctcaggctggaggaggggctcagactcctgctacacgcactccggagcaggtagctccccagattcagactccagcggttcagccagttgggtagttcagccgggtgccatagctcagaccggcgatggagcggctatgtccgccgatgctttgtggagactggataggttcaccaagctcttcacttctacttttgccggtgcatctactgaggatccccaggattatctagacagctgccacgaggttctcagaaacatgggtattgttgagaccaatggggttgattttgctacatttcgcttgtctggatccgccaagacttggtggagggattattgcttagcgagaccagccggatcgccatctttgacttgggagcagtttacagtgttgtttctagagaagtttctccccgttactcagagagaggcctatcggaggcagtttgagcgcctccagcagggttctatgactgttacccagtatgagaccaggttcatcgatttagctcgccatgctctcatcatacttcccaccgagagagagagggtgagaaggtttattgatggtcttattctgccgattcgtcttcagatggccaaggaggccgggagcgagatcacatttcaggaggcggccaatgtggcccgcagagttgagatggttctgtcacagggaggtggtcatgggtcggataagaggccccgtcattcaggcagattcagtggtacctcgtctggaggtagagattcgtatggtagaggccatcctcctaggccctttcagtcagctctccaggtatcacatggtatctcaggtggtcgtggttctcagacgcattatttggatcagcagtccttcagtgcaccaccagctcccatcagtgcaccgccgcttcagagtttccgaggtggtcattcagggcgacagggtcagcagtctcagcagccgagggcttgttacacttgtggtgatatgggtcacattgccaggttttgccctcgagcttcgggtagttctcagcagcagggtcctcgtcctatgattcaggcaccagttgctccacagcctgcccagccagctagaggcgggggtagaggacatagaggtggaggtagaggtcatagaggtggagctcagaccgccagaggtaggggtcagccagcagccgatcgtcccagggatgtgattcagggaggtggggcccagccccgatgttatgctttgccagccaggccagaggctgagtcatccgatgctgttattacaggtactattttggtctgtgatagagatgcttcagtgctatttgaccctggatctacgtattcatatgtgtcgtcctattttgcaccctacctggttatgcctagtgaggccttgagtattcctgtgtatgtatctacaccagtgggtgattctatagtggttgatcgggttcatcgttcctgtgttgtggtgtttaggggacttgagacccgtgttgatttgttgctcttagatatggtggatttcgacgttatattagggatggattggttgtccccgtatcatgcgatcttggattgtcatgccaagactgtgactttagccttaccggatttgccccgtttagagtggagagggactcctggtcattctacccgcagtgttatttctcttgcttatattccggtcggtgagagaccgcttgctttggacgttcaggctttggccaatcagttgtga

SEQ ID NO: 33 - DNA, 2121 bp, Nicotiana tabacum
  modified_base (364)..(405): a, c, t, g, unknown or other
  misc_feature (364)..(405): n is a, c, g, or t
atggcttatcctgcagtgaactctttaattcaaactttggagctattccaaaagacttatccagcattgatccatggtcaaactgcagagatgattgactctctccatgccagtgctgaatattttcaaaatattcttgagaacgctagccaccagaaacaggaatatgatacattcaaatattttgaggcagagataagatcagcgatgcaccaagctgaagatgtgcttgaatcaaatgtgaggcggattaactccttctccactgaaacctatgctcgttgccttggcccccctgatgatgaggatcatttcttcaaaaagggacattctctggtagctggttcttcttcaaaccttgctnnnnnnnnnnnnnnnnnnnnnnnnnnnnnnnnnnnnnnnnnngtcggtttggcgaattccttgagaaaactcactgatgcactacttggattagcttctgagcagaacgtcattcctattttgggaatgggtggatgtggcaataccacacttgctaaaaaggctcaagatgatcaatcaattagatcacattttgacatccaaacgtgggttactatatctcaagaatatcacttaaacgaagtgttgccaagccttgcacgtagccttacaggatacgagtttcagggaatgagtgatgaccagttaatggaccagtcatataaagcacttaagggtcggaagtatcttatcgtagttgatgatatttggagtacaaagatttgggatttgattgcgagaacccttcctgatgacaataatggaagtcgaatcattctgactacgaggctaaaagatgtggctgagtatgctaaccctgatatccctcctcttgaagtgctgccgttaggggtagatgagagttggaagttacttcagaataagttgttggggaaaagccacattaattgtcattctgaattagaagatatcgggaagaaaatagtacaaaaatgccagggactgcctctagcaattttggtggttgctgggcatctctctaggatttccccaaaaagggaaaactgggtaactgtatctgaaaatgtgaatgaagttgttacaagttatccgaatgaatgcatagcagtgcttgcgatcagttaccatcacctgcctattcacctcaaaccttgtttcctccatatgggagcattccctgaggattctgagattgatgcttggcggttaattcgtctgtgggttgcagagggttttctgaagagggataagctgagaagcctggaaaaagtggcagaggattgtttggaagatctggctagcagaaatttaataatggtcaaaagggggaaactcaatggccggatcaaaaatttgcctttgcatacacgcatttcaggggaaaactttaccaagtcagcaaaatttttgcgttgcttgtatcttttcaaggaacctcataaaacaataggaaaaccattggaattcaaagctttgagggtgttggctgccattcctagttttgttcatcacaatctggagtggcgtggaattttaactttacctaaccatatctggaatatgaagcagctgaggcatctccgtctacatggtagcacttatttgcccaacccatatgtggtagacgagttgggtctgcaacatctgcaggagctttccagtctctgtcttgctagctgtacaaaagagagattgaccctatctggaagttggcttccctgggaagacatggcaaatcttgccaagttaccaaatctccaactactcaaacttagatgtcatgcattcagaggtgaggtatggaaattaaaggaggaagatgagttcaagcagctaaagttccttctacttgatgacacagagacacaactctgggaggctaccaatgttaactttccaaatcttcaacgcctcgtattggagaaaatcaagattcttaggcgaattcctatagcctttgcagatacatacaccttggagtcaattgagttgtataaatgcggtctaattgtggattcagccagagaaattcaggaggaagtagctgccatggcgggaagtgattgtcttgctcttcgcatatatatatatgaaggtaacgactttcagaattaa

SEQ ID NO: 34 - DNA, 930 bp, Nicotiana tabacum
atggcgagaacacacgcttcctcatcaattgataagcagcccgagcccccagcagcagctcccacgaggggcagagggcgaggccgaggtaggggcagagctcagcctagagcagcagcaccagcggcggagcctcaggttgagtttgatgatgaggttacgacccaggaagttccggtgggcctagctcatgtctcagaggggttcattgctaccccagtactccaagatgctctgatggctccccagtttcagactctaacaactcagccagttggagcagttcagccggatgtggtagctcagaccggtgatagagcagctatgtctgtcgatgccttgtggagattggacaggttcaccaagctcttcactaccacttttagcggtgcatctttggaggatccccaggattatttggacagatgtcatgaggttctcaggaacatggggatattggagaccaatgggatcgactttgctactttttgcttatctggattcgccaagacttgtacgagaccaggtttattgatttggcccgtcatgatctacttatactccccattgagagagagagtgaggaggttcattgagggactcattcagcctattcgacttcagatggatgaggagacagggagtgagatttctttccaggaggtagccaatgtggctaggagagttgagatggttctatcgcagagaggtggtcaggagtctgataagaggcctcgtcattcaggcagattcagtggcgcctcatctggaggaaaggatttgtatggtagaggccaaccttctaggctttttcattcagcacttcaggtttctcacggtgcttcaggtggctgtggtcctcatatgcaatattctgatcagcagtcctacagtgcaccaccaactcctatcagtgcaccgtcgctttag

SEQ ID NO: 35 - DNA, 1335 bp, Nicotiana tabacum
atggtgaggacgcgagctaccggacgaggtggacgaccaccagtgccaccagctgagaccaccagaggccgtggacgcggtcgtggtcgtggcagaggcagagcagcgagggcagcacctgtagatccaccagctgccctagctccggatcaggctccagctatggatgctccagcagcaccagttcaggcaccagctgtgcccatcgtgattccgggtcttcaggaggccttggcacagatcttatcagtttgcactggcctggctcaggcagtttcagccactacagcagcagctacttcacaggccggaggcaatcagacccccgctgctcgcacacctgagcaggtagtgcagggacttcagacgccgggggcacctccagcccagccggttgcaccagctcaggagtttgttgtgccagttatgccggatgatgagcagcgtctcttgagaggtttggtagactccagcctccgtcattcagtggtgctgagggcgaggatgcccagggttttcttggataagtgtcagcggatgctccgtacagcagggattcttgagtctagtggtgtggcatttaccacctttcagtttactggggctgccttcacttggtgggaggcgtatgagaggcgtaggccggttggagcagcgccccttacttggcagcagttctccactctcttcttggagaagtatgtaccgcagtcccgcagagaggagctgcgtagacagtttgagtggttgcgacagggggatatgactgtgtcacagtatgagtcgaggttttctgagttggctcgtcatgccatttggatggttccgacagatcgtgagaggatcaggagatttgttgatggccttaactatcatctccgtattcttatgacccgagagagggtgttgggtgctacgttcgaggaggtggttgatatcgctcgcgagattgagacggttcgccgtcaggatcgagaggagagggaggccaagaggcctcgagggggcagttatagtggtgctccttcgaggggccagtttcagcatggtagaggtcgttctttcaggcctgctcagtcagcccgcccaggttatcgtggggcatcttcgggtcatggttatcatggatctcagcagggccagtcatcacttagtgcccttccagcccagagttcatctcgtgccccgtcagctcagggttcttctatgccgagtgcatcagctggtcactccggtgcgaggggttcccttcagtccccttctccagcacctgggagttgttttgagtgtggagagtttggacatatgtggaggcagtgtcctcgtcgttgctag

SEQ ID NO: 36 - DNA, 1134 bp, Nicotiana tabacum
atggggatagttgagaccaatggggtcgattttgccacttttcgcttgtctggatccgccaagacttggtggagggatttctgtttggctagaccagccggatcaccagctttgacttgggagcagtttactcagctatttctggagaagtttctccccatcactcagagagaggcctatcggaggcagtttgagcgtctccagcagggttctatgactgttacccagtatgagaccagattcatcgacttggctcgtcatgctcttcatacttcccaccgagagagagagggaggcggccaatgtggccaggagagtggagatggttctgtcgcagggaggtggtcatgggtcgacaagaggccccgtcattcaggcagattcagtggtacctcgtctggaggtagggattcatatggtagaggccatcctcctaggccttttcagtcagcacttcaggtttctcacggtgcttcaggtggccgtggttctcagatgcagtattctgatcagcagtcctacagtgcaccaccagctcctatcagtgcaccgccgctccagagttttcggggtggtcattcaggtcgcagggtcagtcagtttcctcagcagcactcaggtggatgttttgagtgtggtgatatggtcatatccctctcagcagcagggttcccgtgctatggttcaggcaccaggtgttccacagccgcccagccagctagaggtgggggtagagaggtgctagaggtggagcttagaggtggaggccagccagctgcaggccatcccagagatgtagttcagggtggtgggcccagccccgatgttatgctcttccagccaggcctgaggctgaggcttccgatgcagttatcacaggctttggccaatcagttcgtgaggttggatgtttctgagcccagtcgtgtgttagcttgcacggtcgctcgttcttctttattggagcgtatccgtgatcggcagtatgatgatccccatttgtgtgtccttagagacacggtgcagcacggaggtgccaagcaggttaccttaggtacttcagtccgttcgaggacgaacggttgttttagaggtggagaatgtgatgacccaaaaggtcatcacttgttttaa

SEQ ID NO: 37 - DNA, 1239 bp, Nicotiana tabacum
atggtgaagacttctaaaatggctccccaaaaagtcacttcttcttctcaaccgaccaccaaaattgatgaaaccactcctgatgtggtcgacctggagaggtacgctgctgatgtggttaccgatgaaccggctatcgaacctcccttaaaaatgttcattcccgagggttgtttggtcgccgacgactttaagctcggggctgcatcaggagagaagaagaagaagaagaaaagaaaggctttgggttccccgagctcagagaagaaaaaaccgaagagaagattggcctataagccaaaggatagctccagctctcgagcaccagactcagacttgctctactggctcagggaagagcatgaggaggatgatctttttacggcctacgaaccgacctcccccaaagagcgggcgatagccgaggaggagacaacaaaggcctgtctttctcaggttcgggagaccgatgtagaaacgagggctcagccttctcgagacgctggctctgctccacccagcatcaaagaaatttctgggtcaccttctttcaccgaatctatgttggacaaagctcgagcggagaaggagagatataacgaaggggcctatggtgtggacgacccccttcgttgcctttttgaaggtgtggactcaaccgccctaaaagacttctccggttgggttatttggagctgccgagactatctttggaggctttggtacttcatcataaaaattttctctggtaccagcctgaggttaaccagctcgaggctgaggtcaaggagcttgctgagaagagggacacatataagtttctcagcgagaaacataaggaagcggtcaagagtctttgaacaaagtcggacgcgggtccaactccgagtggcaaaagagaaggaaaatgcatgtgctcgacaaatcgatgacctccatgctcaactaggctcagctgctgctaaacgggatacctttaggaaggagctcgaatcagtgaagtctgtgtcagaaataactaggggtgatgctgaagagatggtggcccagtacagggccgatgtcgagggtttctacctgttagccgagattgaagatgcaaaaaggctcgaggccgaggccaagaagctggctgaccccaaggatggggagggctatgagggctccggtgaccccgaggatggagaagaccctgacaaccctactaacgaggtgggttctggtgaagatcgggcttag

SEQ ID NO: 38 - DNA, 1680 bp, Nicotiana tabacum
  modified_base (1504)..(1545): a, c, t, g, unknown or other
  misc_feature (1504)..(1545): n is a, c, g, or t
atggcgagaacacgcgcttcctcatctaccgctcagcagcccgagcccccagcagcagctcccactaggggcagagggcgaggccgtgctagaggccgaggtaggggcagagttcagccccgagcagcagcaccagtggcggagcctcaggttgattttgaggaggaggttccggccccagcagttccggtgggcccagctcaggtcccagaggggtttattgctaccccagttcttcaggacgctctggtccgattggtgggcctcatggagagtgtcacccgagcaggtttgcttcctgtagcaccagccacttctcaggctggaggaggggctcagactcctgctacacgcactccggagcaggtagctcctcagattcagactccagcggttcagccagttggagcagttcagccgggtgtagtagctcagaccggtgatggagcggctatgtctgccgatgctttgtggaggctggataggaacatgggtattgttgagaccaatggggtcgattttgctacatttcgcttgtctggatccgccaagacttggtggagggattattgcttagctaggccagccgggtcgccatctttgacttgggagcagtttacagtattgtttctggagaagtttctccccgttactcagagagaggcctatcggaggcagtttgagcgcctccagcagggttccatgacggtcacccagtatgagaccaggttcatcgacttagctcgccatgctcttgtcatacttcctaccgagagagagagggtgaggaggtttatcgacggtcttattcagccgattcgtcttcagatggccaaggaggccgggagtggtcgtggtcctccgattcagtattctgatcagcagtccttcagtgcaccaccagcacctatcagtgcaccgccgcttcagagttttcagggtcgtcagccccagcagccgagggcttgttttacttgtggcgacacgaggcacattgctaggtattgccctcgagcttcgagcagttctccgcatcagggttcccgtgctatggttcaggcaccagatgttccacagcccgcccagccagctagagctagaggtggaggtagaggtcctagaggtggagctcaggccgccagaggtggaggccagccagcagcaggccgtcccagagaggtagttcagggtggtggggcccagccccgatgttatgctctcccagccaggcccgaggctgaggcttcagatgcagttattacaggtacggttctggtttgtgatagagatgcttcagtgttatttgatccagggtctacatactcgtatgtgtcatcttattttgcaccgtatctggtcatgcctagtgattcgttgagtattcctgtttatgtgtctacaccggtgggtgattctattgtggtagatcgagtccatcgctcttgtgtagttgtgattgggggtcttgagactcgtgtggatttgttgcttctagacatggtcnnnnnnnnnnnnnnnnnnnnnnnnnnnnnnnnnnnnnnnnnncacgctatcttggactgtcatgccaagactgtgaccttagctttaccggtcttgcttatattccggtcggtgagaggccgcttgcttggatgttcaggctttggccaatcgatttgtgaggttggatatttctga

SEQ ID NO: 39 - DNA, 2001 bp, Nicotiana tabacum
  modified_base (1630)..(1671): a, c, t, g, unknown or other
  misc_feature (1630)..(1671): n is a, c, g, or t
atggcgagaacacgcgcttcctcatctaccgctcagcagcccgagcccccagcagcagctcccactaggggcagaggccgaggccgtgctagaggccgaggtaggggcagagttcagccccgagcagcagcaccagtggcggagcctcaggttgattttgaggaggaggttccggccccagcagttccggtgggcccagctcaggtcccagaggggtttattgctaccccagttcttcaggacgctctggtccgattggtgggcctcatggagagtgtcacccgagcaggtttgcttcctgtagcaccagccacttctcaggctggaggaggggctcagactcctgctacacgcactccggagcaggtagctcctcagattcagactccagcggttcagccagttggagcagttcagccgggtgtagtagctcagaccggtgatggagcggctatgtctgccgatgctttgtggaggctggataggttcaccaagctcttcactactactttcagcggtgcttcttctgaggatccccaggattttctatatagctgtcacgagagagaggcctatcggaggcagtttgagcgcctccagcagggttccatgacggtcacccagtatgagaccaggttcatcgacttagctcgccatgctcttgtcatacttcctaccgagagagagagggtgaggaggtttatcgacggtcttattcagccgattcgtcttcagatggccaaggaggccgggagtgagatcacttttcaggaggcggccaatgtggcccgcagagttgagatggttctgtcgcagggaggtggtcaggggtcggataagaggccccgtcattcaggcagattcagtggtacctcgtctggaggtagagattcatatggtagaggccatcctcctaggccctttcagtcagctcttcaggcttttcacggtgcttcaggtggccgtggtcctccgattcagtattctgatcagcagtccttcagtgcaccaccagcacctatcagtgcaccgccgcttcagagttttcagggtcgtcagccccagcagccgagggcttgttttacttgtggcgacacgaggcacattgctaggtattgccctcgagcttcgagcagttctccgcatcagggttcccgtgctatggttcaggcaccagatgttccacagcccgcccagccagctagaggtgggggtagaggtgctagaggtggaggtagaggtcctagaggtggagctcaggccgccagaggtggaggccagccagcagcaggccgtcccagagaggtagttcagggtggtggggcccagccccgatgttatgctctcccagccaggcccgaggctgaggcttcagatgcagttattacaggtacggttctggtttgtgatagagatgcttcagtgttatttgatccagggtctacatactcgtatgtgtcatcttattttgcaccgtatctggtcatgcctagtgattcgttgagtattcctgtttatgtgtctacaccggtgggtgattctattgtggtagatcgagtccatcgctcttgtgtagttgtgattgggggtcttgagactcgtgtggatttgttgcttctagacatggtcnnnnnnnnnnnnnnnnnnnnnnnnnnnnnnnnnnnnnnnnnncacgctatcttggactgtcatgccaagactgtgaccttagctttaccggccagtatgggcagtcttgcttatattccggtcggtgagaggccgcttgctttggatgttcaggctttggccaatcgatttgtgaggttggatatttctgagcctagtcgagtattagcttgcacggtcgctcgttcttcattattggagcgtatccgtgatcggcagtttgatgatccccatttgtgtgtccttagagacacggtgcagcgtggaggtgccaagcaggttaccttaggtacttccttcttctgtccgttcgaggacgaacggttgttttag

SEQ ID NO: 40 - DNA, 816 bp, Nicotiana tabacum
atggaaatcgacttgaacattcaagagttgctagtgatcgatgattcagatttgcttatgcaccaggtacaaggagagtgggccaccaagaattccaagatattgccatatctgcaccatgtgcaggaattaagaaagaggttcatgaagatagaatttcgacatgtgcccagaattcagaatgagtttgtcgatgcagtagccaccttgtcatctatgatacaacatccatataaaaattatattgatcccatcccagtgaagatccataatcagtcggcatattgcgctcatgttgaagaagaaatagatggaaagccttggttccatgacatcaagaagtatttgtcaaagggagaatatcttgagcacgcaaaccacactcagaaatgcacactccagagattttacaatcacttcttccacggcggaggaaatttgtacaggagaactcctgatttgggtttcctaagatgtgtcgatgcaaaggaagcttctaagctacttgaggatgtacatgccgggacttgtggcctgcacatgaatggtttcgtcttggctaagaagatacttagggtcggttacttttggatgaccatggaaacggattgcatccatgtgccaaggccaaatttatcagaacataatgtccagagctttcaactaaagggtcaaactaaggcaatttacaccagggtgctgacaggaggagcacccatacttgcaaaaattgatggagcaatttggccaaaaccaattaattcagacgcaatcaagagatacgatgcttggattatttacatttttctcatctaa

SEQ ID NO: 41 - DNA, 1188 bp, Nicotiana tabacum
atggtgaaacaacaagggaaaggctctaaacaaccaggccgaggagaatcctccctgggagggaaacagaaaatggtcaaactcactccccaagctaggcaaaacatcaagaacataaggaaggccataaaagtggctgacaaagacattgacatttcggggacccaagcatcagtgaacatttcttctaggtcgtctgagggctcaccagcgggtagtagggatgaatactctaccactcccacagcttcattatctgaagagggtgttgtaggagatgaggaagaagtaggtggtgacgatgaagtagaagaaggaggtgaaccacaagagtggtggccggtgagaaagttgatcccggagcggagtttcattgatagtgacttgctacctcacaaccccaacatgaggagacagtttaggatgagagttggctgggaccatttccttgataagtgtgaggattccaacgaacacttggtcaaagaattttacagcaatgtagcccacatcaaaaagggctccaaagtgaccaaggttcaaaattggaaggtgttgtttgatgggaagtatataaatgaatacctgagcttcaatgagaggacgagaccttatacatggcaaatttggaaatgggagaggagccggttggaccctaccactcatgacaacgcctttcctctccatcgggctgtattggtcacttctattatggtggggtaccccatcaatatggggaatgtgatgtcgaggattattactattgtgggtgccgagcatgatagaaacaatccattccccagcttcctgactgagtacttccgggacctgaaagtggatgagaggccctatgacatcaaggtcaaggagatagccccattttcctggtatagcatgaagggggataacaaccccaagagcaagaactacaaagctcatgcttctgccccaattgtccagtctaaagatccagttatggtagaggtccctgctgagcctacctctactcctgctgacatctctcccggaccttccacatccacagctattcctgctggtctatccacatcagcgggcccggagatcccatcttactgggcccatcatattactacccaccgtctaagccaggcacttctaaatttcaacaactggatgaagactgcctcatctaagttgtccatctag

SEQ ID NO: 42 - DNA, 1533 bp, Nicotiana tabacum
atggctgaaaaaacttccgatctctttgcctctatggagatgagcaggttctacaccactgacccatatatggaacctttcattttgactgagccttcctcaccctctaccactcttgctgctgcagtcacaccttccccaatttcccaatatcttcccaactcagaaacctttaaaactactattttgttctccccatcgtctgttgttcccaccaatcaaaccctaagtggagaacaagggtatgcaatagcagatactactggggcatcacatgaggaacctgatccctctccggaggacccagtcgaggtggaagagggaactccagaggaacccggttcacttgttaggcgatctttgaaaaagacaaagcctgtgtcaatagagaaagggtcaacatctaagtccaaaaagaaggaggtagtgagtgagttttctatgtctgatgaggatgtactagttaagtctaaggcaaaaggcaaagtcagtggagagaagtttgggaaacgcaagtcggaatcttttgacgaacctagttctatgaagaaaatgagaagtgaagtcagccttggctctgagcttttgaggcatcaaaaagttctattgggtcgtatgtttgacccaacaatctctgatatggctggaatgcgccaaattctggaaatggtcgagtttcaacgttgggtgcatctatttcacatggatgcacctaaggtgtatgaggaggaggtacaaagtttctttgctagcctctttccagttgatactgaccatgtctatgctttggtcaatggggtggacatcgtgtttgatgtaaaattgcttggagagattttaaaagttcctacagttagggtgttgagtgtacgagatgttttcatgttgcctcgagccgaaaggaggttagtgacttctaagtctgacctattcctaatggagcaacttgacggtttcaatcctatgattcttcctgctattatgatcgaacacatgcaaaaggtttccaccttcaaggacggtaatcatggacttccctatggattctttcttactccagtgttcaaattctttaaagttccactgggaatagctgaggaaattcatcggttgaaggccatgaatgttatcctggaagatcagcaagcccaaggggttcccatgtcgaatgatgaagtggcttgtttgacacaggagaatgctaatctcagggcgcaagttgagaacttgaaggcggaactgctcaacgagcaaaagtcggcaaacaccttaatagacctcgttctccaggcattttctgctgctaccaatccttttactcctagtgccctaaagtacccctttagtgaccagttttctggatatgtttcttatgtttttgtttcattgttgatgagtcaattggacacaactagaaatgaagtgactggcgtcactgtttctgccgtactgcactgtcctcccactcattctctaacaaaacaaagtactcacatcatttcaagtgatgtgatcaagatgtacccacaatga

SEQ ID NO: 43 - DNA, 930 bp, Nicotiana tabacum
atgcaatattctgatcagcagtcctacagtgcaccaccagctcctatcagtgcactgctgctccagagttttcggggtggttattcaggtcgccagggtcagtctcagtttcctcagccacaacacttaggtggatgttttgagtgtggtgagtatggttatattaggaggacttgtccgaggttagtgggtactcagtcgcagcagcagggtttccgcgctatggttggggcaccaggttttccacagaccacccagccagctagaggttctagatgtggaggtagaggatttagaggtggagctcagaccgctagagccaagcccgaggctgaggctttagatgtagttattacaggtacggttcttgtttgtgatagagatgctttagtgttatttgatccagggtctacgtactcgtatgtgtcatcttattttgcaccgtatctggacatgcctagtgattcattgagtgttcctgtatatgtgtctacaccggtgggtgattctattatggtagatcgagtccatcgctcttttatagttgtgattgagggtcttgagactcgtgtagatctgttgcttctggacatggtcgatttctatgttatattggggatggactggttatcaccttaccacgctatcttagactatcatgccaagactgtgaccttagccttatcgggtttacctcgtttagagtggagaggtactcctagtcattctacccgtagtatgggcaatcttgcttatattccgggcggtgagagaccgcttgctttggatgttcgggatttggccaatcaattcatgaggttggatgtctctgagcccagccatgtgctagcttgcacagccgcttgttcttctttattggagcgtatccgtaatcggcagtatgatgatccccatttgtgtgttccttag

SEQ ID NO: 44 - DNA, 654 bp, Nicotiana tabacum
atggttaagtttgggaagagaaccatcttgaaaggtaggctcctcaggaacttagaggaggaaggaatggtaatgcttctggagaagttacaggtgcaaggatggaaggacatggtctttcagatgatggaaggatacaatgactataagaagctcaaatggacaagcctagagaatctccctactgcccttgccagtactagaaaattttgtgacaatgaggaggaaattgagcccaaggctatttacaaaaatgagatgaagccacccaacaaagtgttgctccaatttgtaaacaaatgtgtgctgccaagggttctaaatggaactaagacttatgtcataccctatggttttattctcacgattgttcttgcacatttaaaggtacccatcaagaaatgggaagttggtacaaacaaggatcattttggggctaacactttgactgcttgtaactatgaggctcaaatcactcccaaaaaacctggttcatccaaaaaggtaccagtgaatagcaaagtgcgagttttggtgcaagaaagtagggcaaaggatgctgagcctgataggctaaagaagaggttggctgaaatggagaccgagagagatgctctcagagctgagcttgcaaaagagaatgagaagaattag

SEQ ID NO: 45 - DNA, 1470 bp, Nicotiana tabacum
atggtgaggaattactgcgggtggagcgagggggtaacactgcaggtgctttctccaaataagggtattacagactccactgatggagttttgagcgtatacctataccctttcgcatttggcccccctgctagggttgtgcttgatttttgcttgaagtatcgagttactctggcgcagatttatccatcgtttcggcgaatggtaatgataatgaggttcttcgtggagaaggttgggctcgaattcacgtttaatcacctcgttagactataccggccatttcattatcgaggcctgctaactctgaggtgccgtttgtccacgccctttgttgtcgatgatgaagaagacaaggaccgagagtgggccagttggtttattcaggctcaaactgctgacattatcccaacagggcttttgccatttcctgaagggtggaatcatgcaccaacttcgtggatgccgggcaaagtccttgaccttcccgtctgggtccataagttggcgacccattcgacttgcgacgagcgcaggtggcgagctgtatttcgtaccaaatggggagtgaaataccaagggcggttgtttgggatgagacagtgttcttccgaagaggagaaagagtcgtcagcctccaagccgagggaggatggtgataagggggatcggcacccgcggtattcccgggcggcgattcctccgagtgaatatgctctgcccgaggttggttctcctggggccggagaggcaggatcaacaggaatgtgttctggcttagaggaagtccatcggcttctcttcgaggcctgtgatgggcttatgtctaagctgctctgtcaaggggccaggctccagaaattcttgaacgatggcgagtcctttaggctccttagccaagagaatggggctaagttggcacgttggcgatatgaggcgtatcagagctcaaactatgagagttgtttgatagagcaggtcagagctgagataattaatgcccaggctaaagtggcgctaagccggaccaaggctgatcaggagatggcgattcatatgaaggatgttgctgatgcccaagctgagctaaagcgagccctcgaccgggagaagaggatcgaggagtatgttcgttgcagatctcggagagaggccggttttggtgtttggcgggatcctcgtaggtccggaactggtcggatagacctaggggctcttaagtgtaatcccttacgctttgttttctgctcgttaaggtcttttggaatatttttgcttgacccgtcttcggttctagaggaacttcgatttcaagtcgttgtcggcgatgttttgagcacctcaaaaggtcaaatgagtgagagggttaccaacacatcaatacgaggccgaggcgaagtctcggcgtccctttccttggaagcaagggtgtcctttggaatattccccagaccagtgtttccccggtga

SEQ ID NO: 46 - DNA, 918 bp, Nicotiana tabacum; identical to SEQ ID NO: 26

SEQ ID NO: 47 - DNA, 2718 bp, Nicotiana tabacum
atgggtagaattgaaatgatgttcgaacagatgatgaagaaaaatgcagattctgatgcacagttggctttccacaatacctcaatcagaaatttggaggttcagataggccaaatctctcagtccttgaatacacgccctaagggtgctctaccaagtgatatagtagtaaacccaaagggtgagaacaatcatgttatggcagtaactacaaggagtggacgaggcggtgatgtgaatgcctctaaacaaaagcaagttttgagtgatgatattgagttgcaagaagatgaagttcctttggttgtagaaaatgtgatagatgacaatatgaatgaagaagtgatgattgatattcaagatgccgaggtggaaactcaaaatgacgtgaacccgtctagggaacacgtaatagatatgtcggagctggtggtgcctaaagccaagtatcaatttgattcctactcggttttcaaaattttgtgtattgggcaacctaggccgacttccatgagattacaaatggcggatagaacgatgaagagatcattggatattatcgatgatgtccttatccgggtggacaaatttatcttgccagctgattttgtgatcttggactgtgaggtggattatgaagttcctatcatattggggagatctttccttgctaccgggaaggccttagttcatgtggaagtaggggacctcacctttcgggtgggtgatgaaaaagtggtctttcatgtttacaagtcaatgaaacagcccaacagtaccaaagtgtgctcttttatggacctcgtcacaatagtgataattgatgacaccagtgtaatgatcaatgtggaggactcattggaggccgtattgttgaatcttgatgtcaatgatgatgagggccgagtggagtgcgtgaatgctttacatgggatgggctcttactcttatgaacctaggaaactatctctggatctcgagaataggaagactccaccaacaaagccttcaattgaggagcctccggtgttggatttgaaaccacttccttcacaccttagtgcggcatatggtggaaaaattattcaagtctctgaagttttcaatgcggaccacactacattgtacaatggtgaaacaagaggcaagggttctaaacaaccaggcaggggagagtcctcccggggagggaaacagaagatgctaagattgactccccaagcccgacaaaacattaaaaacacaaggaagctcactaaagctgctgataggtccattgaccagtctgggagtgaatacgagccctcccgagatatatcttcagactcaatcccagagtacatccctgactggccggagagaaacagactaagagacactcttccacctttccccactgtccaagcgtcagtaaatgtatcttctggttcgtctgagggctcagctgaaggtagtggggatgaatactccacctctcccacaacttcattatccgaagagggtgtagtaggggaagaagaggtagtaggagaagggggtcagccccaggttggtagggtagaacgaactagaaatccggaggtgtggcaagaccactttgtgagtgaggtggcctaccataaattcaaagaatggtggcctgtgaggaaattaatttcggagagaatttttgtagatagaaaccttttgcctcacaaccccaatgtgagaaggcaatttagagatagagtgggctgggagtatttcttaaacaattgtgaggatgcaaacgagcacctagtcaaggaattctacaccaatgttgcccacatcaagaagggcaccaaagtgaccaaggtgtgcaatttgaaagtgttgtttgataggaaaacaataaatgactacttggacttcgatgagaaggatgagtcgctgtatttggaaaagatggaattaggtgaggaggtctgtccttggttggcacagtatctggcaaacccaggtatcacccccgattggttgaatgcgggagtgaaaattttgataagaagtttgaatttcgaggccaaggggtgggaaacatttgtgtgtagcagattggaccccactactcatgaaaactcactccctcttcaccgggcagtattggtagcatcaatcatggtagggtacccaattaacgtcgggaaggtgatgtctcgggtgattacacagggtgatgacaacccgaaaggcaagaactacaagggaacatccactgatccaactggcaagtctgaagagccagttgtggtagtggctcctactcatcttgcctccacctcaatggacatccaccctggtccatccattttagcagctctagagataccctctacctcggctcatccagtgactgcacaatgtctaagccagacccttcttagcatcaacagttggatgcagacagcttcctctaagttgtttgccctcactactgcagtagcatctcagtcgacacctccacctctacagtcatatggaaaagctctcaaagagcttgctagggaggccaagaagatgagaaagacgcgggcttccaaggagtccgtgaaggagttgagggttaaggttgataggatgaaggcagaaagacgctttggatttattgctacaagaccctgtgccaacatctcaccctcagctagagcagtcccagaggcctcccaagaggaagaggatgattccccgagcagatga

SEQ ID NO: 48 - DNA, 2421 bp, Nicotiana tabacum
atggctgatgtagcagtgaattttctggtagagaatttgatgcagttgttgagggacaatacagagctaatatttggagtgaaaggtgaggcagagaatctgcttcaagatttgagtgagttcaatgcgtttctgaagcaagcagacaagtcccgcagcgataacgaagttctaaaagaattggtgaagagtatcagaaaagtgacgaatgattctgaagacgctattgataagtttgtaattgaggcaaagcttcacaaggacaaaggggtaggcaggtttgtggacattgcgcattataaaagagtgaaagatgtagcccttgagattaaaggtatcagagatagggtgaaagaaatccgtctgaacaatgcacatggccttcaagctcttcaagatgatgatccatccaacagaggcgtggaagacagaaagcctcccgtggttgaggaagatgatgtggtgggctttgatgaggaggcacagaaggtaatcgaccgtcttcttgacagatcagatgaattagaggttattccagttgtaggaatgcctggtcttggcaaaaccacactagcaactaagattttcaagcatcggaagcaaattcaccggaaaaacaaaacaataccaatatatgtgtgggaacgtatcaagattgctttcccgaacaacaaaaagtgcaatagagtattgttgaccactcgagatcacaaggtggctcatcattgcaacaatactccacatgatttaaaatttcttagcgatgaggaaagttggatgttgctagagaagaaagtttttcacaaggctaaatgtcctccggaattggaaagacctggacagagcatagccaggaagtgtaagggacttccccttgcaattgtggtgattgcaggagctctaatagggaaacgcaagacaacaagggagtgggagcaagtggatcagagtgttggtgaacacctcattaatagaaaccagccaaagaattgtaataaaattggtgcaaatgaaggctttgagatccctgcttggaatttgatccgtttatggatcgccgaaggcttcatccaatacaaagggcccttatcccttgaacgtaaagcagaggattacttgaatgatctcgtcaacagaaacttagtgatgataattcaaaggacgtctgatggacaaatcaaaacatgtcgtgttcatgacatgttgcatgagttttgctggcaagaggccacaacagaagaaaatcttttccaagaggtaaaattaggtgttgggcaatttgctcgtgagatacagcaactatccacctaccgccgcttgtgcattcattcctcagttctggaattcatttctatgaagccctctggtgagcatgttaggtcattcctatgtttttcttcagaaaaaattgacatgcccccggttgacatcccaaacataccaaaagactttccattgctaagggtgttggatgctgaatccatcaaattcagttgcttttgcagggagtttttccaattgtattttctgaggtatattgctttctcatctgactttatcaagatccttcctaaacatattggggaactatggaacgtacaaaccctcattgttaacacacaacagagcaatcttgatattcaagcagacatatggaacatgccacggctgaggcatctgcacactaacacgtccgctaaattgcctacgcctgttgccccaaaaagtagcaaggttacctcggtaaatcaatgcctacaaactctctccacaattgcaccagaaagctgcacagaagaagttttttcaagggctccaaacttgaaaaaactgggcattcgtggtaaaatctttatgcttctggaaccaaataagtccgaattgttcaacaatgttaagaagctacaatgtcttgagaacttgaagctgataaatgttggtcaaagtgggaaacaattacgccttcctccaacatatatatttccgacaaatttgaggaagctaacattattagatacctggttggagtgggatgatatgtctgtattgggccagttagagtaccttgaagtcttgaagctgaaagacaatgcatttaagggagaatactgggaaccaaaagttggaggttttcgttccctactagtgttatggatcgaaaggtcagatttagcttcttggaatgcttcaagtgatcactttccaagacttaagcgtcttgttctcgtatcatgtgataaacttgaggaggtccccattggcttggctgatatacgcggcctccaagttatggagttgcgaaattcaaccaagcaaacagcaaaatctgcccgggatatacaggccaaaaaagacaagcaaactcaagaaggggctaaaacccaaaggttcaagctttctatattccctccttatctctga

SEQ ID NO: 49 - protein, 1847 aa, Nicotiana tabacum
MDLVHQDEDVTAELEVQTPKPKKSKTFSKKSTSMSKSAELSTLAKRTRSTVKTIQAKVTEGEAWSSEEEDESDSEKDKMAKFGKRTILKVLDGRDTSLVKGVQISFDMKELGGILGVHDEGYNNYKKLKWQSLENFPTALAITRKFSDHEKESVPKTVYKSEMKSPHKVLFEFVIKYVLPRVINGTKSHSIPYGFILTTVLSCFKVPLNKCEVATSKDHFGAKTLIACDYEESEAKEAKIARMKTRLAEVESERDALRTKLARQKEKNDGIFQDMLKLLQENNPAPRSSKPKVPSLVWMVLRVAVLVGRDKEKVDGGERCSMSAMCAYLIEPRGLGSDSEAVRGVFDLRKCCRISAVSAQSFSSMRSHRSRSSFWTSAVGFDRELTSVQRHRGSLADRGRGRARGRGRGRAQPRAAVPEVEPHVDYDEEVPAPAAPVGPAQVPEGFIATPVLQDALVRLVGLMERVTRTGLLPVAPATSQAGGGAQTPATRTPEQVAPQIQTPAVQPVGVVQPGAIAQTGDGAAMSADALWRLDRFTKLFTSTFAGASTEDPQDYLDSCHEVLRNMGIVETNGVDFATFRLSGSAKTWWRDYCLARPAGSPSLTWEQFTVLFLEKFLPVTQREAYRRQFERLQQGSMTVTQYETRFIDLARHALIILPTERERVRRFIDGLILPIRLQMAKEAGSEITFQEAANVARRVEMVLSQGGGHGSDKRPRHSGRFSGTSSGGRDSYVLQCTTSSHQCTAASEFPRWSFRRQGQQSQQPRACYTCGDMGHIARFCPRASGSSQQQGPRPMIQAPVAPQPAQPARGGGRGHRGGGRGHRGGAQTARGRGQPAADRPRDVIQGGGAQPRCYALPARPEAESSDVVITGTILVCDRDASVLFDPGSTYSYVSSYFAPYLVMPSEALSIPVYVSTPVGDSIVVDRVHRSCVVVFRGLETRVDLLLLDMVDFDVILGMDWLSPYHAILDCHAKTVTLALPDLPLRVERETPLLFLSSMGSLAYIPVGERPLALDVQALANQLVRLDISEPSRVLACTVARSSLLERIRDRQFDDPHLCVLRDTVQRGGAKQEPRGLGCLFRNGFRLRKIAELLSAGVQSFVLCDRIAISRSSFWTSAVGFDRELTSVQRHRGSLADRGRGRARGRGRGRAQPRAAVPEVEPHVDYDEEVPAPAAPVGPAQVPEGFIATPVLQDALVRLVGLMERVTRTGLLPVAPATSQAGGGAQTPATRTPEQVAPQIQTPAVQPVGVVQPGAIAQTGDGAAMSADALWRLDRFTKLFTSTFAGASTEDPQDYLDSCHEVLRNMGIVETNGVDFATFRLSGSAKTWWRDYCLARPAGSPSLTWEQFTVLFLEKFLPVTQREAYRRQFERLQQGSMTVTQYETRFIDLARHALIILPTERERVRRFIDGLILPIRLQMAKEAGSEITFQEAANVARRVEMVLSQGGGHGSDKRPRHSGRFSGTSSGGRDSYVLQCTTSSHQCTAASEFPRWSFRRQGQQSQQPRACYTCGDMGHIARFCPRASGSSQQQGPRPMIQAPVAPQPAQPARGGGRGHRGGGRGHRGGAQTARGRGQPAADRPRDVIQGGGAQPRCYALPARPEAESSDVVITGTILVCDRDASVLFDPGSTYSYVSSYFAPYLVMPSEALSIPVYVSTPVGDSIVVDRVHRSCVVVFRGLETRVDLLLLDMVDFDVILGMDWLSPYHAILDCHAKTVTLALPDLPLRVERETPLLFLSSMGSLAYIPVGERPLALDVQALANQLVRLDISEPSRVLACTVARSSLLERIRDRQFDDPHLCVLRDTVQRGGAKQVLPSYVRSRTNGCFRGGECDDPKGHHRFSPFFVLPRP

SEQ ID NO: 50 - protein, 1338 aa, Nicotiana tabacum
MERVTRTGLLPVAPATSQAGGGAQTPATRTPEQVAPQIQTPAVQPVGVVQPGAIAQTGDGAAMSADALWRLDRFTKLFTSTFAGASTEDPQDYLDSCHEVLRNMGIVETNGVDFATFRLSGSAKTWWRDYCLARPAGSPSLTWEQFTVLFLEKFLPVTQREAYRRQFERLQQGSMTVTQYETRFIDLARHALIILPTERERVRRFIDGLILPIRLQMAKEAGSEITFQEAANVARRVEMVLSQGGGHGSDKRPRHSGRFSGTSSGGRDSYVLQCTTSSHQCTAASEFPRWSFRRQGQQSQQPRACYTCGDMGHIARFCPRASGSSQQQGPRPMIQAPVAPQPAQPARGGGRGHRGGGRGHRGGAQTARGRGQPAADRPRDVIQGGGAQPRCYALPARPEAESSDVVITGTILVCDRDASVLFDPGSTYSYVSSYFAPYLVMPSEALSIPVYVSTPVGDSIVVDRVHRSCVVVFRGLETRVDLLLLDMVDFDVILGMDWLSPYHAILDCHAKTVTLALPDLPLRVERETPLLFLSSMGSLAYIPVGERPLALDVQALANQLVRLDISEPSRVLACTVARSSLLERIRDRQFDDPHLCVLRDTVQRGGAKQEPRGLGCLFRNGFRLRKIAELLSAGVQSFVLCDRIAIWRGHALPHRPRSSPSPQQQLLLGAEGEARPRGRGRGRAQPRAAVPEVEPHVDYDEEVPAPAAPVGPAQVPEGFIATPVLQDALVRLVHQALHFYFCGASTEDPQDYLDSCHEVLRNMGIVETNGVDFATFRLSGSAKTWWRDYCLARPAGSPSLTWEQFTVLFLEKFLPVTQREAYRRQFERLQQGSMTVTQYETRFIDLARHALIILPTERERVRRFIDGLILPIRLQMAKEAGSEITFQEAANVARRVEMVLSQGGGHGSDKRPRHSGRFSGTSSGGRDSYGRGHPPRPFQSALQVSHGISGGRGSQTHYLDQQSFSAPPAPISAPPLQSFRGGHSGRQGQQSQQPRACYTCGDMGHIARFCPRASGSSQQQGPRPMIQAPVAPQPAQPARGGGRGHRGGGRGHRGGAQTARGRGQPAADRPRDVIQGGGAQPRCYALPARPEAESSDAVITGTILVCDRDASVLFDPGSTYSYVSSYFAPYLVMPSEALSIPVYVSTPVGDSIVVDRVHRSCVVVFRGLETRVDLLLLDMVDFDVILGMDWLSPYHAILDCHAKTVTLALPDLPRLEWRGTPGHSTRSVISLAYIPVGERPLALDVQALANQLVRLDISEPSRVLACTVARSSLLERIRDRQFDDPHLCVLRDTVQRGGAKQVLPSYVRSRTNGCFRGGECDDPKGHHRFSPFFVLPRP

SEQ ID NO: 51 - protein, 494 aa, Nicotiana tabacum
MARTRASLSTEQQPEPPAAAPIRGRGRGHARGRGRGRAQPRAAVPEVEPHVDYDEEVPAPVTLVGLTQVPEGFIATLVLQDALVQLVGLMERVTRICFLPVAPATSLAGGGAQTPSTRTPEFTKLFTSTFAGAFTEDPQDYLESFHEVLRNMGIIETNGVDFATFRLSGSAKTWFNDLARHALIILPTERERVRRFIDGLILPIRLQMAKEGGSEITFQEAVNVARIVEMVMSYGGGHRSDKRPRHSGRFCGIASGGRDSYGRGHPPRLVQSAHQPAQPARGGGRGHRGGGRGHRGGAQTARGTILVCDRDASVLFDPGSTYSHVSSYFAPYLVIRSEALSIPVYVSTLVGDSIVVDWVHRSCVVVFRGLETRVDLLLLDMVDFDIILGMDWLSPYHAILDCHAKIVTLALSDFPHLEWRGTPGHSTRSVISYVKARCMVEKGCLAYSAYVRDSSAEIPSIDSVTLSCLYSGRRETSCFGRSGFGQSVNEVGYF

SEQ ID NO: 52 - protein, 1325 aa, Nicotiana tabacum
MERVTRTGLLPVAPATSQAGGGAQTPATRTPEQVAPQIQTPAVQPVGVVQPGAIAQTGDGAAMSADALWRLDRFTKLFTSTFAGASTEDPQDYLDSCHEVLRNMGIVETNGVDFATFRLSGSAKTWWRDYCLARPAGSPSLTWEQFTVLFLEKFLPVTQREAYRRQFERLQQGSMTVTQYETRFIDLARHALIILPTERERVRRFIDGLILPIRLQMAKEAGSEITFQEAANVARRVEMVLSQGGGHGSDKRPRHSGRFSGTSSGGRDSYVLQCTTSSHQCTAASEFPRWSFRRQGQQSQQPRACYTCGDMGHIARFCPRASGSSQQQGPRPMIQAPVAPQPAQPARGGGRGHRGGGRGHRGGAQTARGRGQPAADRPRDVIQGGGAQPRCYALPARPEAESSDVVITGTILVCDRDASVLFDPGSTYSYVSSYFAPYLVMPSEALSIPVYVSTPVGDSIVVDRVHRSCVVVFRGLETRVDLLLLDMVDFDVILGMDWLSPYHAILDCHAKTVTLALPDLPLRVERETPLLFLSSMGSLAYIPVGERPLALDVQALANQLVRLDISEPSRVLACTVARSSLLERIRDRQFDDPHLCVLRDTVQRGGAKQEPRGLGCLFRNGFRLRKIAELLSAGVQSFVLCDRIAISRSSFWTSAVGFDRELTSVQRHRGSLADMARTRASSSTAQQPEPPAAAPIRGRGRGRGPEAEAGAELSPEQQFQSSSGRPGSIGGPYGESHPNRFASCSTSHFSGWRRGSDSCYTHSGAGSSPDSDSSGSASWVVQPGAIAQTGDGAAMSADALWRLDRFTKLFTSTFAGASTEDPQDYLDSCHEVLRNMGIVETNGVDFATFRLSGSAKTWWRDYCLARPAGSPSLTWEQFTVLFLEKFLPVTQREAYRRQFERLQQGSMTVTQYETRFIDLARHALIILPTERERVRRFIDGLILPIRLQMAKEAGSEITFQEAANVARRVEMVLSQGGGHGSDKRPRHSGRFSGTSSGGRDSYGRGHPPRPFQSALQVSHGISGGRGSQTHYLDQQSFSAPPAPISAPPLQSFRGGHSGRQGQQSQQPRACYTCGDMGHIARFCPRASGSSQQQGPRPMIQAPVAPQPAQPARGGGRGHRGGGRGHRGGAQTARGRGQPAADRPRDVIQGGGAQPRCYALPARPEAESSDAVITGTILVCDRDASVLFDPGSTYSYVSSYFAPYLVMPSEALSIPVYVSTPVGDSIVVDRVHRSCVVVFRGLETRVDLLLLDMVDFDVILGMDWLSPYHAILDCHAKTVTLALPDLPRLEWRGTPGHSTRSVISLAYIPVGERPLALDVQALANQL

SEQ ID NO: 53 - protein, 706 aa, Nicotiana tabacum
  MOD_RES (122)..(135): Any amino acid
MAYPAVNSLIQTLELFQKTYPALIHGQTAEMIDSLHASAEYFQNILENASHQKQEYDTFKYFEAEIRSAMHQAEDVLESNVRRINSFSTETYARCLGPPDDEDHFFKKGHSLVAGSSSNLAXXXXXXXXXXXXXXVGLANSLRKLTDALLGLASEQNVIPILGMGGCGNTTLAKKAQDDQSIRSHFDIQTWVTISQEYHLNEVLPSLARSLTGYEFQGMSDDQLMDQSYKALKGRKYLIVVDDIWSTKIWDLIARTLPDDNNGSRIILTTRLKDVAEYANPDIPPLEVLPLGVDESWKLLQNKLLGKSHINCHSELEDIGKKIVQKCQGLPLAILVVAGHLSRISPKRENWVTVSENVNEVVTSYPNECIAVLAISYHHLPIHLKPCFLHMGAFPEDSEIDAWRLIRLWVAEGFLKRDKLRSLEKVAEDCLEDLASRNLIMVKRGKLNGRIKNLPLHTRISGENFTKSAKFLRCLYLFKEPHKTIGKPLEFKALRVLAAIPSFVHHNLEWRGILTLPNHIWNMKQLRHLRLHGSTYLPNPYVVDELGLQHLQELSSLCLASCTKERLTLSGSWLPWEDMANLAKLPNLQLLKLRCHAFRGEVWKLKEEDEFKQLKFLLLDDTETQLWEATNVNFPNLQRLVLEKIKILRRIPIAFADTYTLESIELYKCGLIVDSAREIQEEVAAMAGSDCLALRIYIYEGNDFQN

SEQ ID NO: 54 - protein, 309 aa, Nicotiana tabacum
MARTHASSSIDKQPEPPAAAPTRGRGRGRGRGRAQPRAAAPAAEPQVEFDDEVTTQEVPVGLAHVSEGFIATPVLQDALMAPQFQTLTTQPVGAVQPDVVAQTGDRAAMSVDALWRLDRFTKLFTTTFSGASLEDPQDYLDRCHEVLRNMGILETNGIDFATFCLSGFAKTCTRPGLLIWPVMIYLYSPLRERVRRFIEGLIQPIRLQMDEETGSEISFQEVANVARRVEMVLSQRGGQESDKRPRHSGRFSGASSGGKDLYGRGQPSRLFHSALQVSHGASGGCGPHMQYSDQQSYSAPPTPISAPSL

SEQ ID NO: 55 - protein, 444 aa, Nicotiana tabacum
MVRTRATGRGGRPPVPPAETTRGRGRGRGRGRGRAARAAPVDPPAALAPDQAPAMDAPAAPVQAPAVPIVIPGLQEALAQILSVCTGLAQAVSATTAAATSQAGGNQTPAARTPEQVVQGLQTPGAPPAQPVAPAQEFVVPVMPDDEQRLLRGLVDSSLRHSVVLRARMPRVFLDKCQRMLRTAGILESSGVAFTTFQFTGAAFTWWEAYERRRPVGAAPLTWQQFSTLFLEKYVPQSRREELRRQFEWLRQGDMTVSQYESRFSELARHAIWMVPTDRERIRRFVDGLNYHLRILMTRERVLGATFEEVVDIAREIETVRRQDREEREAKRPRGGSYSGAPSRGQFQHGRGRSFRPAQSARPGYRGASSGHGYHGSQQGQSSLSALPAQSSSRAPSAQGSSMPSASAGHSGARGSLQSPSPAPGSCFECGEFGHMWRQCPRRC

SEQ ID NO: 56 - protein, 377 aa, Nicotiana tabacum
MGIVETNGVDFATFRLSGSAKTWWRDFCLARPAGSPALTWEQFTQLFLEKFLPITQREAYRRQFERLQQGSMTVTQYETRFIDLARHALHTSHREREGGGQCGQESGDGSVAGRWSWVDKRPRHSGRFSGTSSGGRDSYGRGHPPRPFQSALQVSHGASGGRGSQMQYSDQQSYSAPPAPISAPPLQSFRGGHSGRRVSQFPQQHSGGCFECGDMVISLSAAGFPCYGSGTRCSTAAQPARGGGREVLEVELRGGGQPAAGHPRDVVQGGGPSPDVMLFQPGLRLRLPMQLSQALANQFVRLDVSEPSRVLACTVARSSLLERIRDRQYDDPHLCVLRDTVQHGGAKQVTLGTSVRSRTNGCFRGGECDDPKGHHLF

SEQ ID NO: 57 - protein, 412 aa, Nicotiana tabacum
MVKTSKMAPQKVTSSSQPTTKIDETTPDVVDLERYAADVVTDEPAIEPPLKMFIPEGCLVADDFKLGAASGEKKKKKKRKALGSPSSEKKKPKRRLAYKPKDSSSSRAPDSDLLYWLREEHEEDDLFTAYEPTSPKERAIAEEETTKACLSQVRETDVETRAQPSRDAGSAPPSIKEISGSPSFTESMLDKARAEKERYNEGAYGVDDPLRCLFEGVDSTALKDFSGWVIWSCRDYLWRLWYFIIKIFSGTSLRLTSSRLRSRSLLRRGTHISFSARNIRKRSRVFEQSRTRVQLRVAKEKENACARQIDDLHAQLGSAAAKRDTFRKELESVKSVSEITRGDAEEMVAQYRADVEGFYLLAEIEDAKRLEAEAKKLADPKDGEGYEGSGDPEDGEDPDNPTNEVGSGEDRA

SEQ ID NO: 58 - protein, 559 aa, Nicotiana tabacum
  MOD_RES (502)..(515): Any amino acid
MARTRASSSTAQQPEPPAAAPTRGRGRGRARGRGRGRVQPRAAAPVAEPQVDFEEEVPAPAVPVGPAQVPEGFIATPVLQDALVRLVGLMESVTRAGLLPVAPATSQAGGGAQTPATRTPEQVAPQIQTPAVQPVGAVQPGVVAQTGDGAAMSADALWRLDRNMGIVETNGVDFATFRLSGSAKTWWRDYCLARPAGSPSLTWEQFTVLFLEKFLPVTQREAYRRQFERLQQGSMTVTQYETRFIDLARHALVILPTERERVRRFIDGLIQPIRLQMAKEAGSGRGPPIQYSDQQSFSAPPAPISAPPLQSFQGRQPQQPRACFTCGDTRHIARYCPRASSSSPHQGSRAMVQAPDVPQPAQPARARGGGRGPRGGAQAARGGGQPAAGRPREVVQGGGAQPRCYALPARPEAEASDAVITGTVLVCDRDASVLFDPGSTYSYVSSYFAPYLVMPSDSLSIPVYVSTPVGDSIVVDRVHRSCVVVIGGLETRVDLLLLDMVXXXXXXXXXXXXXXHAILDCHAKTVTLALPVLLIFRSVRGRLLGCSGFGQSICEVGYF

SEQ ID NO: 59 - protein, 666 aa, Nicotiana tabacum
  MOD_RES (544)..(557): Any amino acid
MARTRASSSTAQQPEPPAAAPTRGRGRGRARGRGRGRVQPRAAAPVAEPQVDFEEEVPAPAVPVGPAQVPEGFIATPVLQDALVRLVGLMESVTRAGLLPVAPATSQAGGGAQTPATRTPEQVAPQIQTPAVQPVGAVQPGVVAQTGDGAAMSADALWRLDRFTKLFTTTFSGASSEDPQDFLYSCHEREAYRRQFERLQQGSMTVTQYETRFIDLARHALVILPTERERVRRFIDGLIQPIRLQMAKEAGSEITFQEAANVARRVEMVLSQGGGQGSDKRPRHSGRFSGTSSGGRDSYGRGHPPRPFQSALQAFHGASGGRGPPIQYSDQQSFSAPPAPISAPPLQSFQGRQPQQPRACFTCGDTRHIARYCPRASSSSPHQGSRAMVQAPDVPQPAQPARGGGRGARGGGRGPRGGAQAARGGGQPAAGRPREVVQGGGAQPRCYALPARPEAEASDAVITGTVLVCDRDASVLFDPGSTYSYVSSYFAPYLVMPSDSLSIPVYVSTPVGDSIVVDRVHRSCVVVIGGLETRVDLLLLDMVXXXXXXXXXXXXXXHAILDCHAKTVTLALPASMGSLAYIPVGERPLALDVQALANRFVRLDISEPSRVLACTVARSSLLERIRDRQFDDPHLCVLRDTVQRGGAKQVTLGTSFFCPFEDERLF

SEQ ID NO: 60 - protein, 271 aa, Nicotiana tabacum
MEIDLNIQELLVIDDSDLLMHQVQGEWATKNSKILPYLHHVQELRKRFMKIEFRHVPRIQNEFVDAVATLSSMIQHPYKNYIDPIPVKIHNQSAYCAHVEEEIDGKPWFHDIKKYLSKGEYLEHANHTQKCTLQRFYNHFFHGGGNLYRRTPDLGFLRCVDAKEASKLLEDVHAGTCGLHMNGFVLAKKILRVGYFWMTMETDCIHVPRPNLSEHNVQSFQLKGQTKAIYTRVLTGGAPILAKIDGAIWPKPINSDAIKRYDAWIIYIFLI

SEQ ID NO: 61 - protein, 395 aa, Nicotiana tabacum
MVKQQGKGSKQPGRGESSLGGKQKMVKLTPQARQNIKNIRKAIKVADKDIDISGTQASVNISSRSSEGSPAGSRDEYSTTPTASLSEEGVVGDEEEVGGDDEVEEGGEPQEWWPVRKLIPERSFIDSDLLPHNPNMRRQFRMRVGWDHFLDKCEDSNEHLVKEFYSNVAHIKKGSKVTKVQNWKVLFDGKYINEYLSFNERTRPYTWQIWKWERSRLDPTTHDNAFPLHRAVLVTSIMVGYPINMGNVMSRIITIVGAEHDRNNPFPSFLTEYFRDLKVDERPYDIKVKEIAPFSWYSMKGDNNPKSKNYKAHASAPIVQSKDPVMVEVPAEPTSTPADISPGPSTSTAIPAGLSTSAGPEIPSYWAHHITTHRLSQALLNFNNWMKTASSKLSI

SEQ ID NO: 62 - protein, 510 aa, Nicotiana tabacum
MAEKTSDLFASMEMSRFYTTDPYMEPFILTEPSSPSTTLAAAVTPSPISQYLPNSETFKTTILFSPSSVVPTNQTLSGEQGYAIADTTGASHEEPDPSPEDPVEVEEGTPEEPGSLVRRSLKKTKPVSIEKGSTSKSKKKEVVSEFSMSDEDVLVKSKAKGKVSGEKFGKRKSESFDEPSSMKKMRSEVSLGSELLRHQKVLLGRMFDPTISDMAGMRQILEMVEFQRWVHLFHMDAPKVYEEEVQSFFASLFPVDTDHVYALVNGVDIVFDVKLLGEILKVPTVRVLSVRDVFMLPRAERRLVTSKSDLFLMEQLDGFNPMILPAIMIEHMQKVSTFKDGNHGLPYGFFLTPVFKFFKVPLGIAEEIHRLKAMNVILEDQQAQGVPMSNDEVACLTQENANLRAQVENLKAELLNEQKSANTLIDLVLQAFSAATNPFTPSALKYPFSDQFSGYVSYVFVSLLMSQLDTTRNEVTGVTVSAVLHCPPTHSLTKQSTHIISSDVIKMYPQ

SEQ ID NO: 63 - protein, 309 aa, Nicotiana tabacum
MQYSDQQSYSAPPAPISALLLQSFRGGYSGRQGQSQFPQPQHLGGCFECGEYGYIRRTCPRLVGTQSQQQGFRAMVGAPGFPQTTQPARGSRCGGRGFRGGAQTARAKPEAEALDVVITGTVLVCDRDALVLFDPGSTYSYVSSYFAPYLDMPSDSLSVPVYVSTPVGDSIMVDRVHRSFIVVIEGLETRVDLLLLDMVDFYVILGMDWLSPYHAILDYHAKTVTLALSGLPRLEWRGTPSHSTRSMGNLAYIPGGERPLALDVRDLANQFMRLDVSEPSHVLACTAACSSLLERIRNRQYDDPHLCVP

SEQ ID NO: 64 - protein, 217 aa, Nicotiana tabacum
MVKFGKRTILKGRLLRNLEEEGMVMLLEKLQVQGWKDMVFQMMEGYNDYKKLKWTSLENLPTALASTRKFCDNEEEIEPKAIYKNEMKPPNKVLLQFVNKCVLPRVLNGTKTYVIPYGFILTIVLAHLKVPIKKWEVGTNKDHFGANTLTACNYEAQITPKKPGSSKKVPVNSKVRVLVQESRAKDAEPDRLKKRLAEMETERDALRAELAKENEKN

SEQ ID NO: 65 - protein, 489 aa, Nicotiana tabacum
MVRNYCGWSEGVTLQVLSPNKGITDSTDGVLSVYLYPFAFGPPARVVLDFCLKYRVTLAQIYPSFRRMVMIMRFFVEKVGLEFTFNHLVRLYRPFHYRGLLTLRCRLSTPFVVDDEEDKDREWASWFIQAQTADIIPTGLLPFPEGWNHAPTSWMPGKVLDLPVWVHKLATHSTCDERRWRAVFRTKWGVKYQGRLFGMRQCSSEEEKESSASKPREDGDKGDRHPRYSRAAIPPSEYALPEVGSPGAGEAGSTGMCSGLEEVHRLLFEACDGLMSKLLCQGARLQKFLNDGESFRLLSQENGAKLARWRYEAYQSSNYESCLIEQVRAEIINAQAKVALSRTKADQEMAIHMKDVADAQAELKRALDREKRIEEYVRCRSRREAGFGVWRDPRRSGTGRIDLGALKCNPLRFVFCSLRSFGIFLLDPSSVLEELRFQVVVGDVLSTSKGQMSERVTNTSIRGRGEVSASLSLEARVSFGIFPRPVFPR

SEQ ID NO: 66 - protein, 305 aa, Nicotiana tabacum
MRRSRRTSNLFPLDPEIERSLHRERKELEARYKTERELGILVQPQPIVMAGNGGRSVIEARRPNLANMTQAIVKPDITDYFELKQYTVQLIQSTRQYVGLSHEDPQRHIQNFLEITDTYNYPNVSKDYVRLTLFPFSLLGEAKEWLQKEPANSIHTWDDLSKKFLIKFFPTKKTKPLRSQILGFQQRDGETLRQAWERYKKLLRDCPHHCQTDELLGHTFVDGLDETSKMNLDSACGRSCMARLYSEIQLLLNNFTVNDHNWQGEGEPRRAMKQKAAGVLELDDFSAMRADIAKLANQMNRMTMN

SEQ ID NO: 67 - protein, 905 aa, Nicotiana tabacum
MGRIEMMFEQMMKKNADSDAQLAFHNTSIRNLEVQIGQISQSLNTRPKGALPSDIVVNPKGENNHVMAVTTRSGRGGDVNASKQKQVLSDDIELQEDEVPLVVENVIDDNMNEEVMIDIQDAEVETQNDVNPSREHVIDMSELVVPKAKYQFDSYSVFKILCIGQPRPTSMRLQMADRTMKRSLDIIDDVLIRVDKFILPADFVILDCEVDYEVPIILGRSFLATGKALVHVEVGDLTFRVGDEKVVFHVYKSMKQPNSTKVCSFMDLVTIVIIDDTSVMINVEDSLEAVLLNLDVNDDEGRVECVNALHGMGSYSYEPRKLSLDLENRKTPPTKPSIEEPPVLDLKPLPSHLSAAYGGKIIQVSEVFNADHTTLYNGETRGKGSKQPGRGESSRGGKQKMLRLTPQARQNIKNTRKLTKAADRSIDQSGSEYEPSRDISSDSIPEYIPDWPERNRLRDTLPPFPTVQASVNVSSGSSEGSAEGSGDEYSTSPTTSLSEEGVVGEEEVVGEGGQPQVGRVERTRNPEVWQDHFVSEVAYHKFKEWWPVRKLISERIFVDRNLLPHNPNVRRQFRDRVGWEYFLNNCEDANEHLVKEFYTNVAHIKKGTKVTKVCNLKVLFDRKTINDYLDFDEKDESLYLEKMELGEEVCPWLAQYLANPGITPDWLNAGVKILIRSLNFEAKGWETFVCSRLDPTTHENSLPLHRAVLVASIMVGYPINVGKVMSRVITQGDDNPKGKNYKGTSTDPTGKSEEPVVVVAPTHLASTSMDIHPGPSILAALEIPSTSAHPVTAQCLSQTLLSINSWMQTASSKLFALTTAVASQSTPPPLQSYGKALKELAREAKKMRKTRASKESVKELRVKVDRMKAERRFGFIATRPCANISPSARAVPEASQEEEDDSPSR

SEQ ID NO: 68 - protein, 806 aa, Nicotiana tabacum
MADVAVNFLVENLMQLLRDNTELIFGVKGEAENLLQDLSEFNAFLKQADKSRSDNEVLKELVKSIRKVTNDSEDAIDKFVIEAKLHKDKGVGRFVDIAHYKRVKDVALEIKGIRDRVKEIRLNNAHGLQALQDDDPSNRGVEDRKPPVVEEDDVVGFDEEAQKVIDRLLDRSDELEVIPVVGMPGLGKTTLATKIFKHRKQIHRKNKTIPIYVWERIKIAFPNNKKCNRVLLTTRDHKVAHHCNNTPHDLKFLSDEESWMLLEKKVFHKAKCPPELERPGQSIARKCKGLPLAIVVIAGALIGKRKTTREWEQVDQSVGEHLINRNQPKNCNKIGANEGFEIPAWNLIRLWIAEGFIQYKGPLSLERKAEDYLNDLVNRNLVMIIQRTSDGQIKTCRVHDMLHEFCWQEATTEENLFQEVKLGVGQFAREIQQLSTYRRLCIHSSVLEFISMKPSGEHVRSFLCFSSEKIDMPPVDIPNIPKDFPLLRVLDAESIKFSCFCREFFQLYFLRYIAFSSDFIKILPKHIGELWNVQTLIVNTQQSNLDIQADIWNMPRLRHLHTNTSAKLPTPVAPKSSKVTSVNQCLQTLSTIAPESCTEEVFSRAPNLKKLGIRGKIFMLLEPNKSELFNNVKKLQCLENLKLINVGQSGKQLRLPPTYIFPTNLRKLTLLDTWLEWDDMSVLGQLEYLEVLKLKDNAFKGEYWEPKVGGFRSLLVLWIERSDLASWNASSDHFPRLKRLVLVSCDKLEEVPIGLADIRGLQVMELRNSTKQTAKSARDIQAKKDKQTQEGAKTQRFKLSIFPPYL

SEQ ID NO: 69 - DNA, 3831 bp, Artificial Sequence
  Description of Artificial Sequence: Synthetic polynucleotide
  misc_feature (1)..(522): pCSVM promoter
  misc_feature (529)..(1221): g100614_Scaffold0002504 RNAi construct
  misc_feature (1228)..(1512): NOS terminator I
  misc_feature (1513)..(2741): ACTII Promoter
  misc_feature (2742)..(3616): NPT II Kanamycin Resistance
  misc_feature (3617)..(3831): NOS terminator II
aagcttccagaaggtaattatccaagatgtagcatcaagaatccaatgtttacgggaaaaactatggaagtattatgtgagctcagcaagaagcagatcaatatgcggcacatatgcaacctatgttcaaaaatgaagaatgtacagatacaagatcctatactgccagaatacgaagaagaatacgtagaaattgaaaaagaagaaccaggcgaagaaaagaatcttgaagacgtaagcactgacgacaacaatgaaaagaagaagataaggtcggtgattgtgaaagagacatagaggacacatgtaaggtggaaaatgtaagggcggaaagtaaccttatcacaaaggaatcttatcccccactacttatccttttatatttttccgtgtcatttttgcccttgagttttcctatataaggaaccaagttcggcatttgtgaaaacaagaaaaaatttggtgtaagctattttctttgaagtactgaggatacaacttcagagaaatttgtaagtttgtggatccatgtccacaaacctgcctacccctttgtccttgtgaagctttgcctcaattacaaacttatcaatagcgtcttcagaatcattcgtcacttttctgatactcttcaccaattcttttagaacttcgttatcgctgcgggacttgtctgcttgcttcagaaacgcattgaactcactcaaatcttgaagcagattctctgcctcacctttcactccaaatattagctctgtattgtccctcaacaactgcatcaaattctctaccagaaaataataagatcttcaacacctacaccatttttttaatcactactacccattgcattgaacaaacttccaagttcttcttagcttcagattaagaaagtaccctttcttggctttgttgatgtggtaccattgtccattgtcttgtgtgtttccattttctggtagagaatttgatgcagttgttgagggacaatacagagctaatatttggagtgaaaggtgaggcagagaatctgcttcaagatttgagtgagttcaatgcgtttctgaagcaagcagacaagtcccgcagcgataacgaagttctaaaagaattggtgaagagtatcagaaaagtgacgaatgattctgaagacgctattgataagtttgtaattgaggcaaagcttcacaaggacaaaggggtaggcaggtttgtggacattctagactcgacgaactgacgagctcgaatttccccgatcgttcaaacatttggcaataaagtttcttaagattgaatcctgttgccggtcttgcgatgattatcatataatttctgttgaattacgttaagcatgtaataattaacatgtaatgcatgacgttatttatgagatgggtttttatgattagagtcccgcaattatacatttaatacgcgatagaaaacaaaatatagcgcgcaaactatgataaattatcgcgcgcggtgtcatctatgttactagatcgggaattcctcgagcaactatttttatgtatgcaagagtcagcatatgtataattgattcagaatcgttttgacgagttcggatgtagtagtagccattatttaatgtacatactaatcgtgaatagtgaatatgatgaaacattgtatcttattgtataaatatccataaacacatcatgaaagacactttctttcacggtctgaattaattatgatacaattctaatagaaaacgaattaaattacgttgaattgtatgaaatctaattgaacaagccaaccacgacgacgactaacgttgcctggattgactcggtttaagttaaccactaaaaaaacggagctgtcatgtaacacgcggatcgagcaggtcacagtcatgaagccatcaaagcaaaagaactaatccaagggctgagatgattaattagtttaaaaattagttaacacgagggaaaaggctgtctgacagccaggtcacgttatctttacctgtggtcgaaatgattcgtgtctgtcgattttaattatttttttgaaaggccgaaaataaagttgtaagagataaacccgcctatataaattcatatattttcctctccgctttgaattgtctcgttgtcctcctcactttcatcagccgttttgaatctccggcgacttgacagagaagaacaaggaagaagactaagagagaaagtaagagataatccaggagattcattctccgttttgaatcttcctcaatctcatcttcttccgctctttctttccaaggtaataggaactttctggatctactttatttgctggatctcgatcttgttttctcaatttccttgagatctggaattcgtttaatttggatctgtgaacctccactaaatcttttggttttactagaatcgatctaagttgaccgatcagttagctcgattatagctaccagaatttggcttgaccttgatggagagatccatgttcatgttacctgggaaatgatttgtatatgtgaattgaaatctgaactgttgaagttagattgaatctgaacactgtcaatgttagattgaatctgaacactgtttaaggttagatgaagtttgtgtatagattcttcgaaactttaggatttgtagtgtcgtacgttgaacagaaagctatttctgattcaatcagggtttatttgactgtattgaactctttttgtgtgtttgcagctcataaaaggtaccaaacaatgattgaacaagatggattgcacgcaggttctccggccgcttgggtggagaggctattcggctatgactgggcacaacagacaatcggctgctctgatgccgccgtgttccggctgtcagcgcaggggcgcccggttctttttgtcaagaccgacctgtccggtgccctgaatgaactgcaggacgaggcagcgcggctatcgtggctggccacgacgggcgttccttgcgcagctgtgctcgacgttgtcactgaagcgggaagggactggctgctattgggcgaagtgccggggcaggatctcctgtcatctcaccttgctcctgccgagaaagtatccatcatggctgatgcaatgcggcggctgcatacgcttgatccggctacctgcccattcgaccaccaagcgaaacatcgcatcgagcgagcacgtactcggatggaagccggtcttgtcgatcaggatgatctggacgaagagcatcaggggctcgcgccagccgaactgttcgccaggctcaaggcgcgcatgcccgacggcgaggatctcgtcgtgacccatggcgatgcctgcttgccgaatatcatggtggaaaatggccgcttttctggattcatcgactgtggccggctgggtgtggcggaccgctatcaggacatagcgttggctacccgtgatattgctgaagagcttggcggcgaatgggctgaccgcttcctcgtgctttacggtatcgccgctcccgattcgcagcgcatcgccttctatcgccttcttgacgagttcttttgagcgggactctggcgatcgccccgatcgttcaaacatttggcaataaagtttcttaagattgaatcctgttgccggtcttgcgatgattatcatataatttctgttgaattacgttaagcatgtaataattaacatgtaatgcatgacgttatttatgagatgggtttttatgattagagtcccgcaattatacatttaatacgcgatagaaaacaaaatatagcgcgcaaactaggataaattatcgcgcgcggtgtcatctatgttactagatcgggactagt

SEQ ID NO: 70 - DNA, 3831 bp, Artificial Sequence
  Description of Artificial Sequence: Synthetic polynucleotide
  misc_feature (1)..(522): pCSVM promoter
  misc_feature (529)..(1221): g100631_Scaffold0002504 RNAi construct
  misc_feature (1228)..(1512): NOS terminator I
  misc_feature (1513)..(2741): ACTII Promoter
  misc_feature (2742)..(3616): NPT II Kanamycin Resistance
  misc_feature (3617)..(3831): NOS terminator II
aagcttccagaaggtaattatccaagatgtagcatcaagaatccaatgtttacgggaaaaactatggaagtattatgtgagctcagcaagaagcagatcaatatgcggcacatatgcaacctatgttcaaaaatgaagaatgtacagatacaagatcctatactgccagaatacgaagaagaatacgtagaaattgaaaaagaagaaccaggcgaagaaaagaatcttgaagacgtaagcactgacgacaacaatgaaaagaagaagataaggtcggtgattgtgaaagagacatagaggacacatgtaaggtggaaaatgtaagggcggaaagtaaccttatcacaaaggaatcttatcccccactacttatccttttatatttttccgtgtcatttttgcccttgagttttcctatataaggaaccaagttcggcatttgtgaaaacaagaaaaaatttggtgtaagctattttctttgaagtactgaggatacaacttcagagaaatttgtaagtttgtggatccttgattgatcatcttgagcctttttagcaagtgtggtattgccacatccacccattcccaaaataggaatgacgttctgctcagaagctaatccaagtagtgcatcagtgagttttctcaaggaattcgccaaaccgactgtatcatcatcatcatcatcatcacctagaagggaagtaggagcaaggtttgaagaagaaccagctaccagagaatgtccctttttgaagaaatgatcctcatcatcaggggggccaaggcaacgagcattaataagatcttcaacacctacaccatttttttaatcactactacccattgcattgaacaaacttccaagttcttcttagcttcagattaagaaagtaccctttcttggctttgttgatgtggtaccattgtccattgtcttgtgtgtttccaatgctcgttgccttggcccccctgatgatgaggatcatttcttcaaaaagggacattctctggtagctggttcttcttcaaaccttgctcctacttcccttctaggtgatgatgatgatgatgatgatacagtcggtttggcgaattccttgagaaaactcactgatgcactacttggattagcttctgagcagaacgtcattcctattttgggaatgggtggatgtggcaataccacacttgctaaaaaggctcaagatgatcaatcaatctagactcgacgaactgacgagctcgaatttccccgatcgttcaaacatttggcaataaagtttcttaagattgaatcctgttgccggtcttgcgatgattatcatataatttctgttgaattacgttaagcatgtaataattaacatgtaatgcatgacgttatttatgagatgggtttttatgattagagtcccgcaattatacatttaatacgcgatagaaaacaaaatatagcgcgcaaactatgataaattatcgcgcgcggtgtcatctatgttactagatcgggaattcctcgagcaactatttttatgtatgcaagagtcagcatatgtataattgattcagaatcgttttgacgagttcggatgtagtagtagccattatttaatgtacatactaatcgtgaatagtgaatatgatgaaacattgtatcttattgtataaatatccataaacacatcatgaaagacactttctttcacggtctgaattaattatgatacaattctaatagaaaacgaattaaattacgttgaattgtatgaaatctaattgaacaagccaaccacgacgacgactaacgttgcctggattgactcggtttaagttaaccactaaaaaaacggagctgtcatgtaacacgcggatcgagcaggtcacagtcatgaagccatcaaagcaaaagaactaatccaagggctgagatgattaattagtttaaaaattagttaacacgagggaaaaggctgtctgacagccaggtcacgttatctttacctgtggtcgaaatgattcgtgtctgtcgattttaattatttttttgaaaggccgaaaataaagttgtaagagataaacccgcctatataaattcatatattttcctctccgctttgaattgtctcgttgtcctcctcactttcatcagccgttttgaatctccggcgacttgacagagaagaacaaggaagaagactaagagagaaagtaagagataatccaggagattcattctccgttttgaatcttcctcaatctcatcttcttccgctctttctttccaaggtaataggaactttctggatctactttatttgctggatctcgatcttgttttctcaatttccttgagatctggaattcgtttaatttggatctgtgaacctccactaaatcttttggttttactagaatcgatctaagttgaccgatcagttagctcgattatagctaccagaatttggcttgaccttgatggagagatccatgttcatgttacctgggaaatgatttgtatatgtgaattgaaatctgaactgttgaagttagattgaatctgaacactgtcaatgttagattgaatctgaacactgtttaaggttagatgaagtttgtgtatagattcttcgaaactttaggatttgtagtgtcgtacgttgaacagaaagctatttctgattcaatcagggtttatttgactgtattgaactctttttgtgtgtttgcagctcataaaaggtaccaaacaatgattgaacaagatggattgcacgcaggttctccggccgcttgggtggagaggctattcggctatgactgggcacaacagacaatcggctgctctgatgccgccgtgttccggctgtcagcgcaggggcgcccggttctttttgtcaagaccgacctgtccggtgccctgaatgaactgcaggacgaggcagcgcggctatcgtggctggccacgacgggcgttccttgcgcagctgtgctcgacgttgtcactgaagcgggaagggactggctgctattgggcgaagtgccggggcaggatctcctgtcatctcaccttgctcctgccgagaaagtatccatcatggctgatgcaatgcggcggctgcatacgcttgatccggctacctgcccattcgaccaccaagcgaaacatcgcatcgagcgagcacgtactcggatggaagccggtcttgtcgatcaggatgatctggacgaagagcatcaggggctcgcgccagccgaactgttcgccaggctcaaggcgcgcatgcccgacggcgaggatctcgtcgtgacccatggcgatgcctgcttgccgaatatcatggtggaaaatggccgcttttctggattcatcgactgtggccggctgggtgtggcggaccgctatcaggacatagcgttggctacccgtgatattgctgaagagcttggcggcgaatgggctgaccgcttcctcgtgctttacggtatcgccgctcccgattcgcagcgcatcgccttctatcgccttcttgacgagttcttttgagcgggactctggcgatcgccccgatcgttcaaacatttggcaataaagtttcttaagattgaatcctgttgccggtcttgcgatgattatcatataatttctgttgaattacgttaagcatgtaataattaacatgtaatgcatgacgttatttatgagatgggtttttatgattagagtcccgcaattatacatttaatacgcgatagaaaacaaaatatagcgcgcaaactaggataaattatcgcgcgcggtgtcatctatgttactagatcgggactagt

SEQ ID NO: 71 - DNA, 72 bp, Nicotiana tabacum
aaaaaaaaaaaaaaaaaaaaaaaaaaaaaaaaaaaaaaaaaaaaaaaaaaaaaaaaaaaaaaaaaaaacttt

SEQ ID NO: 72 - DNA, 66 bp, Nicotiana tabacum
atgccatgtggtttatattattggcacgtgagttgtccgtgcgagtccagatatttatactatagc

SEQ ID NO: 73 - DNA, 133550 bp, Nicotiana tabacum
aaatttctaagattatttatttatacattaaatgaattttaaattgggtagatttatcagttcatttcgtatcagcttttgattttaatagagccccaatattgacgggtatattccacatatcaaaacattgttaaaaagagggtctttatacattttacttttgattatgattttaaaaatatataccattatgctttaggtttgaactccactaggtcaagggtaaaaatgagacgattttctaaaataaccgtatgaatagtcccaaagtataatgaatggtaaaattaaaatatttcctataataatatggtaactttttacccttttctaacatttattagttttactaaaaatattcaaattatttcttaacaatgattttgaaaagtattcagttaaaatagtaaggtctagccagttttcggactggtcattcaaaaatagtcagcgtttgtcaagtcattaaaaaatagccactatgtttgctgcaacagagatcgattcagcataatatactggagttcggtgcacctgtatatgaacttctagcatattatgctggaccggtatactttgttggctccagtataatatactggagactggagcaccggtgctccaaactccagtatattatgctggaccagtataatatactggaactccagtatattatgctgcagtatttttccggattttgaacaatgttttcatttagatttatctttacatgaaaaatggctaaattttaattacttttgaaactgtgactatttttaaatgaccacttgtaaatctagctatttttgaatttcttccgaatttaaagtattgacaacgtaaccccctcttattctcattcacaactatgtcgaagttgtttttttactcgtctgtcatcatcacatatatttggtggtaatgtgatcttctggtcattacagaatttgggagaaatgaaatatttggaactctcttttatatctttcacattggaaacccaatttttaaatatcatttagattgggaactacaaactttcttccgttttaagggaaattactagtctaaaagaagaaaaaaggatgagaagaaattcactttcaatttaaaataggtcgttgaagcctttattgaaaaagagagagatacagaaaatgaaagaatactaatatatttcaatgttcagaattgtaggatttaaaagctatttatacaagcaaaggagtctcaattatctcctgattactagcctactaattgctagacaaatatccctgaaattgggcagctaatttgctctacaatttgactgttaggcataatgggagatccctgagattgggctcttaaataaggtatagtcaacaccctcccgcaaactaatgctatgtatcacaaagcatgagtttggatagaagataattgtgtcgacttcttggcatagcctttgtgaacaaatctgctagttgatctttaattagatgatatataccttaggttaatgctccgatcttcaaccagttctctgatgtagttgccgtctacgtctatgtgctttgtattttcatgatgaacgaggttggttgctattcgaattgcattggtattgtctacatacaatatggttgatccttcgatcttgatgtcaagttctgataatagccttcgtagccaaatgatttcaaagcatgcaacaaacatacttctatattctgcctctgtggatgacttcgatgttcaggattgtttcttacacttccatgagatcatgcacgagacaagcatcatgtaccagcatgtagtagatcatcttgaatcagggcatccagcccaatctgcatcagcatatcccaccatgtccagcgatgaatatgatggaaataagagacttcgattcacaataccccttatgtatctaataaccctgagcaaagctgagtagtggatcttaaaagtcttagtgatgaattaacttaacacgtgtactgcataagagatatcatgacgactcatggtaagatatataagtgacccaaccaaacgtctatacaaagtttgatctccaaaatgttctccttcctcttttttgtatttcgtattcacttccattggagtatgaaccttcttatcatctgtgagattagttaactgaagatcttctgcatacttttgcggactcaatcgtatgacttctaatagttaactttagctttcctaggtccttcatcttgaacaaggagtctaatagttttttcagatgagagattccaacttcatcattttctgtgataatcacatcatctatgtaaataaggagaatagtaatatctgagctggaccgacgtaggaataatgaataatctgagatgctctgagtaaaaccagcacctaggatttttgtccgaaatttttcaaaccaagagcgaggagtctgctttaatccatacaaagatttttttaagacgacacacctaatttgcgctagaatgtttataacctggtagtggattcatatagaccacttcttgcaagtctccgtgcatgaaaacattcttgacgtccagttgatgtaactttcaactttttattgacgcgaaagcaagcaatatacatattgtcgtcatcttagctaccggagcaaatattttatcatagccaattccatatttctatttgtacccttgagccaccaatcttgccttgtatcgatatagggatccatcagctttcatcttgattgagtacacccatctacttacaataattattgcatttttcggtctctccaccatatccccgtgtatcatttttctcaaggacaaccaattcttcatgcattgcatcctcccagcatttctgaccacttgcctgcatataagaacttggcacaaccatagaatttaatatagttagcaaggcgtatggtctgccatattcacctggtgagtattcatatcgatctggagggagaacgtgacgaagtaagtgtctaatggcattttgacgaggaggagaaggttggttattaagatttaacggaataatatgtgtctcatgttattgaggtaaaggattagcgtttaccaaggtagaatcattatcaaaaaaggatcagagtcatcagtagtaccagttgtagtagcgagcaagttctacaatggaccagtggctaggttgttatggccaacaaaatcatgagtgaattttttttgcaaaaaggacttagtagaagattgtgagtctttactagcataagtaaaagaattttcaaagaagataacgtgtcgagaaattctcaatgaatggcgtattggatcataacacaaatatcctttttgaatgtcattgtaccccacaaaaatacacttaccagctttagaggataatttatgacgttcatgatcttgaagaagaacaaaatatatacaaccaaatactttaagatgagagtagttcgggcaatttttaaaaaggaataaattaaaataggggcaattttgtttaatgacggaagatgattgcctaatatttttggaacatttgatgtatcaagaagagctaatgcaatttcaacaacatttttatttttacattccaccacaccattttgttcaagtattgtggacctccaaatcttaaattttcgttcttgaaaagttttgcaaaaatcttgatttcgtccatttaaatccgaaataaatgatgaatataaccatagaatcatgaagtataattactttgggatatagaacacttacccagttccatatggttgcggtacttgctatgagttactatcacctgcctattcacttgaaaccttgtttcctccatttaggaacattccccgaggatcatgagattgatccaattgtgggttgcagaggggattctaaagagtaataagttaagaagcctggaagaagtagcagaggattgtttggaagatctggcttgtcgaaatttagtaatggtcacaaggaggaagctcaatggtcagtcaaaagatgcggtatgcatgatctgttgcgcgatttgagcgtgagtgaagctggaaaagaaaagtttttgaatgtgattaggaatattaatcgagctcctaatgatctgtacctccgaggacagagtggtcaacggcaacataacagtataagttctctctgtcttttcagttttacgcaaagcatgaaaacaaaaataaaaatgactaccaccttgtaacttttttttttcggtttgacctactccgttataaatagtaattactcctaattgtcattagtaattgtaattagagacttttggatagagaaaaagagtgtataaaaacctctcacattctcatctgtttaaattaactaaacagatgagagagagagtaatattattagtcatttatttagaaattttgggctgcaatgagaaaaaaacaaatatattattttctagtctaagagatgtcatatcatctattgtaactttaaagaataatatatataaacagatggattttttgtgatttttgaatacttcttctttgtcctccggctccttgtacattttcaagcaacctcttggagcagctggaaaaactgcagaattaagagtattggtttccattcctaggcctattttcaagtaccgccatcgcttaacatcagattcagctttcttgagatacctttagattcgtagaagcaattatctcactgaatcacttgcatatttgtgtaattaatctgcaaacctttatttttaagcatgataaattaaagtgtgatgcagttaattataactttacctgactatatatatctggaatatgaagcagttgaggtacatccatattttgtgctttgaagccaacgactccaacaatcaatcaactcttattgtagtttaaagtacactatccttatgggttaacaccacaatgaaaagaacaacatacagtttcaaccccaaaataaaacagaaaacacatcaaacaaatgaaatacagaaagaaacccaagaatcataaaactgtggttcagtcgttccacttatgacaatgcaataggcttcactgtgagagcagtgagccaaataaagctgaaggaagaaaaagccagcagccaacatcatgcaattatttcagacctgtaccaatagcaacgctcactggttagttttttcctttaataaaaacctatattgctattgtaggccagaatggaaaaaaaataaaaccctaccaaggagaatgttacctactgaatttttatcaaagcataaggttaatcactaaatgcaaccaaaaatcccaagggaaaacgagtagccaatagagaaaatatgcataagattattgccacatgacttagagtgtaattaaactgcatccaactatttgacactgacgattagtcgattactattccaaatgatgttcaaaattgtgatctgtcactcctattagtatatggaagtcagagaaccattgaaataaaaaagaaaacagaaaaggattgcagaagttaggtttccagcacaaaatgcaaggagataactttgtagcatctatatttctggtcaatgtttgttaaatgataacggacaggattttgagataaagaaactggctgattgaattgtttaaattcatagttactaaatattcttatctgcatgttactggcgagtattttagcaagttatacccctccttggaaaaggggagatagcagagaattgcacccaagttaaacatttcctttggattatgaaacacaaatcaaacagtagtgagggaagatttaactaacctttcaaagaagctgtacgccgcgttgatcagagataaggagggaatatagaaagcttgaacctttgggttttagccccttcttgagtttgcttgtcttttttggcctgtatatcccgggcagattttgctgtttgcttggttgaatttcgcaactccataacttggaggccgcgtatatcagccaagccaatggggacctcctcaagtttatcacatgatacgagaacaagacgcttaagtcttggaaagtgatcacttgaagcattccaagaagctaaatctgacctttcgatccataacactagtagggaacgaaaacctccaacttttggttcccagtattctcccttaaatgcattgtctttcagcttcaagacttcaaggtactctaactggcccaatacagacatatcatcccactccaaccaggtatctaataatgttagcttcctcaaatttgtcggaaatatatatgttggaggaaggcgtaattgtttcccactttgaccaacatttatcagcttcaagttctcaagacattgtagcttcttaacattgttgaacaattcggacttatttggttccagaagcataaagattttaccacgaatgcccagttttttcaagtttggagcccttgaaaaaacttcttctgtgcagctttctggtgcaattgtggagagagtttgtaggcattgatttaccgaggtaaccttgctactttttggggcaacaggcgtaggcaatttagcggacgtgttagtgtgcagatgcctcagccgtggcatgttccatatgtctgcttgaatatcaagattgctctgttgtgtgttaacaatgagggtttgtacgttccatagttccccaatatgtttaggaaggatcttgataaagtcagatgagaaagcaatatacctcagaaaatacaattggaaaaactccctgcaaaagcaactgaatttgatggattcagcatccaacacccttagcaatggaaagtcttttggtatgtttgggatgtcaaccgggggcatgtcaattttttctgaagaaaaacataggaatgacctaacatgctcaccagagggcttcatagaaatgaattccagaactgaggaatgaatgcacaagcggcggtaggtggatagttgctgtatctcacgagcaaattgcccaacacctaattttacctcttggaaaagattttcttctgttgtggcctcttgccagcaaaactcatgcaacatgtcatgaacacgacatgttttgatttgtccatcagacgtcctttgaattatcatcactaagtttctgttgacgagatcattcaagtaatcctctgctttacgttcaagggataagggccctttgtattggatgaagccttcggcgatccataaacggatcaaattccaagcagggatctcaaagcctctgggaaatgcaccacaatacaaaaagcatgctttcaagtcgtaaggcaaacgatcataactcatttgcaccaattttattacaattctttggctggtttctattaatgaggtgttcaccaacactctgatccacttgctcccactcccttgttgtcttgcgtttccctattagagctcctgcaatcaccacaattgcaaggggaagtcccttacacttcctggctatgctctgtccaggtctttccaattccggaggacatttagccttgtgaaaaactttcttctctagcaacatccaactttcctcatcgctaagaaattttaaatcatgtggagtattgttgcaatgatgagccaccttgtgatctcgagtggtcaacaatactctattgcactttttgttgttcgggaaagcaatcttgatacgttcccacacatatattggtattgttttgtttttccggtgaatttgctaatgatgttgagatataattctcttgtcttgtatgattgcgagacataaacccaaactcgagtaaagaactcgtattcaaccttccgatgcttgaaaatcttagttgctagtgtggttttgccaagaccaggcattcctacaactggaataacctctaattcatctgatctgtcaagaagacggtcgattaccttctgtgcctcctcatcaaagcccaccacatcatcttcctcaaccacgggaggcttttaaattaatatcaaagatgaagattagacatatatatgaagttaacgttcattggcaagaaaagaaacattatattcaaccaaaacatattgtattacgtacgcatttgtgcagcttaattaaaagataggtgattagctttgttttgtattggaaaaattgatactcagtagtaaatagaagcaaaggtggattttcccaagacatatatagaacactaacattacaacaatatagatattgtccaagaaatgccacacatccttcttactttcacatttttacgatactcattttgttgattatgtcggcttctcatataaaattgataatcattctatgaactttgcgcaggagtatcttcctgtgcaaagtatatttaagtgcaatacagttccgttgattgtaccattatattctgctggaggctcaatggagacatctgaattggttatatttaagcagcatattgtcatctaatcttactcaccttcattcttattaaggagtctaaacctgttaaatatatatatatatatatatatatatatatatatatatatataaatgcaatgctgggtttagggctgtgcatttggatcggatatccgagaatccgaacccatccactctctttagacttattttttcttagtttatatcgaagtctctctctaacttctcttcaaattgctcttttcgcttctcttttttttttttttttttttaatatccctcccaatttaggaggatctatagtgtttccacccttctcctccagcatgactcgaacccaggacctaacggtcgtgggtagaggtgcttttatcaactgagcaagcctcacttgttagttcgcttctcttaagtcttatctttgtgtctctcattctcagtatctccttcctatcgacggacaacgacgatggaaatccgataacgcttttctttttattggtatgccgcttcgcgagcaaggagcgagctaagtaaatcttacctgaaaatgagcgagattcgattctttttcctttgtagtttttgttttgtcatttctttttccttccctctgttaaacagctcagcgacttgggaaagagcttgcccaccgcatactgattgatccgataaagcaaagcaacctggcccacagctctgagttggggcttgattcccagccgagataacatttgtttggaattttagtttattttattttgctatggagctttgttttgtctattgctataaaagacatttgttgcctttcaatttaagccttataaagtgtagtagccgattagattgttagtagccttaataaggcatactatctgattcgaaaatccgaaatatttacccgattcaaactttaaaatccaatccgatccaatttaatttggattggattcggattgcattttataaaaatcggaatccgaatttacaattcgaaatgtgttaaattcgatctgatccgatccgacccgactgatgcatagccctagctgggttactgcattcgttgtctcattgacttgtggtgttgagttacatgctaaaattttacatgataccaacaacaaacatggcaggcaggggcggagctaaagtgttccgagcgggttcggcgcaaattaagggcaaaaaatgaatgattgaaggcatatataatataggtacctttctgtcttccacgcctctgttggatggatcatcatcttgaagagcttgaaggccatgtgcattgttcagacggatttctttcaccctatctctgatacctttaatctcaagggctacatctttcactcttttataatgcgcaatgtccacaaacctgcctacccctttgtccttgtgaagctttgcctcaattacaaacttatcaatagcgtcttcagaatcattcgtcacttttctgatactcttcaccaattcttttagaacttcgttatcgctgcgggacttgtctgcttgcttcagaaacgcattgaactcactcaaatcttgaagcagattctctgcctcacctttcactccaaatattagctctgtattgtccctcaacaactgcatcaaattctctaccagaaaattcactgctacatcagccatcttctttttttccttttttttttgttgttgcaaacaatgtaaaattttagcacaaaagagagactgtcattctttaataagtcttcttttgattcttggagttccaaaaatcaccataaaataaaagcaataattgcatctctgtcttaattaagctggttgacaatatcgaccatgcaagtctataattatattattatttcgcttagtgcatgtgagctcttttgattccacattagtcttgaagttttgtgttttatatgatactccatatcgatgaattagtcccaagcagaaaaaatgaatatatcaaatatatcgaggttgagcaacaaaaaaaaacataaacgactatctacatttatttattactagtatctatgaactgcgttgcacgttaataattatatgtgatggtttaaacatttatttatatgaaggaacaacaaaatttaattaatgaaagaaattgtcacgccccaaccttgggaggcgtggctggcacctggtgtcgcattggcccgagcgaatcactctgtaactttttcattccttttataactatcatgggccaacatagctacaactcgtaatgcataactataagtgggcaacactgtatcactgaatcatatttattaaaacatgaatacatatgggcccgtcaaggcctctgacatactgtaccaactgaacctctgtctacaaagcctctaagattatttgacataaaatgggacagggtaccgacctacccataagtctgtacaaaaactctgacacgatgacttatagactcgcctgcactctgaatgaggtgaagtcttaccaatccttcgctgaatgccaatctcgtctactatgagggctcgccaaaccgattatctatacttgtaagtctggatagctttgtaaatcataaaatatttataatggcatgcatataaatgtcatataatgcataggtctgtacgtacataaaatcatcaagcctctgagggcatcccatcatatcatctcggtcactatgggcaaatcatcaacgtataccagctgatcaggtggtggtgcgtatataacgtcataaccttttcccatatcctatatatatatatcagttggtatacgttgatgatttgcccacagtggccaagatgatatgatatatatatacgtatataacgccatctagtgccattgtgggcagaatcatcaacgtataccagctgatcaggtggtggtgcatatataacgtcatatgagtcatgggtaaatgcacatgcatagtgaagtaagtcaatacgatctcttgtaatgttatgagactataggtgtttaatgggtgggccgggccgggctgggtaggggaatttagtacccgtacgggttatggttcagatcggttatgggttggggcataccggatttaatgggttggggttcatccaggtaaaaattgaaccgtaagggttacaggttcatggggccgggccggaccgggttattgttatttttactttttttttgtattttgaatttttgtataattattgtaagctatattaatataaagtaaaaatataaagaatataatgaagatgggaaaaaattgcacttataaattgcaagtgctacatttatttcaaaattacaaaattgaagtttgcatttaacaagtaaattaacaaaaaaaatagtaaaactaaattttcatgcataataatacatcaaattaatctaacaaactaaaacattaagcataaatacgtctaataattttaaaataacacaaattgtctcaaatcaacttaaatacgaattttcggaggacgctcaagacaattctttatatgcctccttaaactgtctgtgccagattttgaacgaagatttaagacttgaccacaattcttgcactttactttctgaacttcttcattttcttctaccacctcaaagtgtttcaaaacatatgagcgcactctagaagtacgaggcatgatttaacttgagattgagaattgagagatgagtaaagaaatgaggaagatggggtgtatttatagtttttcaaagggggttaatttttttttaaaaaaacccaaaaattgggctaaatgtcaattttagccattgggcaacgaccatattgtgaaatggaccattgccaacggtcagaatctgaggcccaagcttaaaaaagaaattgttaccgttaaatcggtctgggtcggtctgggccgggccggttaaccagatgaacagtattgttcattgaccgggtttgaccggtccggttaaccggtggttcaaaagtgaacggtacaaactgccttactcctataacccagcctcacccggcccccttctaccggtccgggccggttccggttttcaccggtctgagacggtccggaatcgggctgatccggcccgttagacacctttatgtgagactcatatataaataatatggtagtaggacatattgggaattagaaatataggcaaccttaatacttataagaatagaatcatttcaaacttttgagcaatatcacttactagttcttttttattttttaataagtaatcacttagtactagttttcttggtttaatagagaagacttttttttaatcggcaatgcaaaatgtagtgagagttttataatttttcttgttaagttaatttttttttattttacatgacaatgaggcatcttagtaaatattcttatgcgtcttttttaaaacttaagtacttcaagttaactgaatctaacagataatgccataaaaccaagaaaattgggatggttcaggaaaaatctaatattagttatatgcaatatataaaccaaaaagtcagcatcttctcgaaacaacagtgacaccccttgttttcgatagagcagtgacgcccctagttaaatgcaactttaaccaacttacgtatttttaaaactcatacacagatgatagaatagtaaaacttacgggagttcaaaaagataccaatgtgtcatgccaatgatcatgtaattataacgacccgactagttgttttgctttttaaaatcacgttcccctaaatgaaacttcttgcgcttgctttaactaatttacgacctgtgggaatggttggttcgtgatttagaagagtttgggttggaataggctcatttgattccttaagattttcttaaaaggctaagtttgaccttgatcaacatttttagcaaacgaacccgaatacgtgttttggcggccccggagggtccggaggaaaatatgggacctgggcgtatgcccggaatcgaatttcgatgtccctagcctgagtaatgaatttttattagaaattgttaaactgaaattctaaggatttaaagaaactaaataatgattgatcacattggtatcgggatcgtatattggttccagagcccagtacaagtccaatacatttaagacttgcctgcaaaatttggtgtcaatccgaatagtataagtacgtttcggcacgttagaagtgaattgaagaacttgaagttcataagtttgatccaattggttttaaggggtgattcttagatttagtgttttttcgggtgttaaggaggttcacgcgggtctgtttcatgatttcaaacttgtcggtatgttcgggcagggcccgggagccccgagcgtcaatcggacgaggctcgagtgaagttggaaaatttgagaagagctaaagcttcatgttgctgtcataaccgtacctgcggttggttagccgcaggtgcgagaccgcagaagcggtcgttctctcgcaaatgcgaccaaggcaggccaggcccaaaatcgcagaagcggcttcaagaccgcaggagcggtcccagcccacttggccaattccgtagatgcggccttcctctcgcagaagcgggaccgcagatgtgaaaatcactgaagcagtgagcttcatttattacgggctctaagtcattttggccatttttactcacccattgggctatttttgagctcttgagagaggaccttcacctagcatcttcaggtaagtttacactacttatttctagtttaatacttgagtcttaggtagattaacacacaaagattaaggtaaaattatggggttagagcaaaacctagggttttgataaaaattagatttaacaacgaattttgttatgaaatgcgtttgaaatcatatattattaatcgttaggttataaagaacaactttcttcgaaaaattttgaaatccgggaacgtgggcccggggttgaattttaggaaacttgtgtttaaggttggaaaattgcttaaatagttagaatgcaatcttttgagcttgtattgactagttcctacctcatttatctagttttggatcgttcggctccaaattgagggtttgagctcgttcttgatattggaagtacgcttggagcgagttgagtctcctatctaaccttgtaagagggaattgtccccgtaggtgatataatcaaataatttgccattaaatgcgggggctacgtacgcactaggtgacgaaagtccgtgtgtagctactattatgctaagtctgagtaatctaggacccaaaaatatgctttatgtgttattcttgaaactttatgtttaatttggattgtttaaatcatggtgattatggtaaatgagactagtaagaggaacattatctttcttggcctttttaaagagaagttgatatttctatgagtaattgctcctcggttatatattcctatctgcttgttgttgtttttaattacatttgaccgcgtcgcatgtttgattcgcgagcggggtaatagatacatctatggtttgcgccattcgaccctcggcagtgcacaatttacttttacgttggatcgggccgtacgtcctcgacactacttgcgcatgctttactcagtatttttctatgaattgagctttattatttgccctggaatgaaagtggacaactttgatattatctaggagaggacctgttatttcttgctataaactgctaattatttattatatccatgctcagtataattcatttctcatattatttgaccttagtaagtgtcaagtcgacctctcgtctctacttcttcgatattagacaggatacttactgggttcatattgtttatgtactcatactacacttttgtacttaattgtacaggatctgaggtaggtacatctggttaccagtccggtgcgcattcttgatccgtgtccgagattttcatagtgagctgctcccttcctgtgccattcagcagcatgatggagtctctctttattttggttgtctattctatttcagacagtaggatagatttattcttttgtatattctactagttgcccgtaaacttgtgacaccaggttttggcacacacattagtagactattcttttgggaattgtataactattattgtacattgttaattatcacatgctttttaactgcaaatttagaaaacttctgtacttgttttagtaaagagaaaatgaggacttgttaacacttccgcgttggcttgcctgacaagggtgttgggagccatcatgaactatagtagaattgggtcgtgacaacatggtatcagagcactaggttcatgtaggtctcacaagtcatgggaaaacctaatagagtcttgcggatcggtacaaagacgtatgtattcatcttcgagagtctatagggtgttaggaaaactactctttacctatttcctatcgtgcagtggttggtatactaaatttccctcttctattctctcacagatggtgaggacacgtacgactaattttttagacccgggaggagctgctccctccgttgctagaggtcaaggcagaggccgggggagagcaccggctcaaggtaggggacgagggcgtaccaaagctgtctcggtagcaccactagcagatcctacaggagatcctatcattgaggagcagggcgaggtgcccgcagcagagcctaccccggtggactttatgatagcaccgggtttccaagagatcattggccgtatgctgctgttcatggacaccatgactcaggctagtttatttccagtagatccacctatatcataggcaggagggggagaacatgccctactactcaggctcctagccacacagctgcaatgtatcagacttcgggtgcactacctgcggatgaggctcagccagttgctgtagtagtgcccgagcccagactagctgcggatggtgacccgcagaagttattggatagatggactagacttcaccatcctgtcttcgggggtgagcgtcatgaggtttcctaggatttcattgataggtgtagggacaaactgcacaacatgaggatattggagtcgtatggggtagacttcactacttttcagctggagggcagggcccgcagatggtggcagtcttatgttcttggcaggccagcaggttctcctcccctcacttagggtcagttcacacagttatttttggatagggatatttcaccctttgagagggaagagctgcggtatcagtttgagcatcttgaacagagtcagatgtccgtgaccgactatgaggcgagatattctgagttgtctcgccatgctctcatgatacttcccacagattcagagagagtgcggaggtttgttgcggggttgcacctcggtattcgagctagcatggcccgagaggtggagatgggtactgagtatcagctagtggtagagattgctcgtaggattgagggttatcgccagaggggtagagagcagtttcagtaggagaagagggaccgattttctagagagtttagaggttccccagctaggggtagggggcactccgggaggggtcagcccagcatacccccgtattcagcaccaccaccacctccccgaggttctctagtgagaccttattttagtgcgataccggagagtccttaccgtccaccagctattcagggttcctccaccgggtattctagtcatcagggttcttccagtgcttacttcaatgccatgccagagagttcatatcgcccaccagccattcagagttcttctagtggatattcggctcagtaggctcagacttcaaggcaacaggctatggtgccgaggggttactacgagtgtggagatccgagtcacatgaagaggacctgccccaaactttggggcaaggtagtacagtagggtcagcagcctataatttcagcaccggttgctcagcctcccagaggcgggggacagacgggtagaggccatcctagaggtgggggccaggcagagtgaggtcagccagctactgctcagtcaggtggaggctagccagtcggcgctccagccagattctatgcccttccggctaggccagatgtattagcctcagatactgtcaacacaggtattattttcgtctgcggtagagatgcttcggtattatttgatccagggtccacctattcatatgtatcatctctgtttgctcatttcctagttattcctcctgcgcctttgagcactcccgttcatgtgtccactcctgtgggtagttctatggttgtgaatcggatctatcggtcttgtgtagtcacattctgtggttttgagactagagcggatctcctgttgctttatatgatcgatcatcctgggcatggattggttatctccatatcacgccgtcctagattgccatgccaaaactgttacattatcaatgctagggttgccaaggttggagtggaagggttccacagttgatatgtctagtcgggttatctctttcctgaaggcttgtcatatggtcgagaaggggtgtttggcttatttggattatgttcgggataccaccgcagagtctccaacgattgatttagtcccagtagttcgggatattgccgatgtgtttccttctaatcttcctggcatgccaccagatcgtgatattgatttttgtattgatttggctccaggcacccaacctatatccatcccaccataccgtatggttccgaaggagttgaaagagaagcttgaggagtcgttagttaaggggtttgtttgacctagtgtatcaccttgggtgcaccagtgttatttgtgaagatgaaggatgagactatgcggatgcgcattgattaccgccagttgaacaaagtcactatcaagaacaaatatccattgcctcgtatcgacgatttgtttgaacagtttcagggtgcttaggtgttctctaagatcgacttgaggtcaggtaccatcagttgaagatctgggactcggatattctgaagactgcatttcggactagatataactattatgagtttctggtgatgtcctttggcttgactaatgccccaacaacatttatggacttgatgaacagggtgttcaaaccttatattgattcctttgtcatcgtcttcattgacgacatcttgatatactcacgtagcttggaggagcacgagtaacatttgagagtagtgctccagaccttgcgagagcaaaagctatatgctaagttctccaagtgtgagtttttggctagagtcagtggcattctttgggcatgttgtgtcaggagagggtattaaggtggatcccaaaaatattgaggcagtttagagttggccacatcctacttcagtgaccgagatcaggagtttcctatggttaacaggatattacagatgatttgtgcatggcttttcatctattccatcacctctgactagattgacccaggagggtgctcctttccgttggtatgatgattatgaggcgagctttcaggagctcaagacagctttgactacgacaccagttcttgtgttgccttccggttcagggatgtatacggcatattgcgactcttcaggtgttggattgggatgtgtattgatgcaggaagggcaagttattgcatatcttcacgtaagctaaagatccatgagaagaattatcttgtgcacgatttgaagttggccgcgattgttcatgctcttaagatatagaggcattatctatatggggtgtcatatgaggtttatactgatcatcgcggcttacagcatttattctagcagagggatctcaatttgaggcagcatagatggcttgagttactgaaggattatgacatcaccattctttatcatccgggcaaggaaaatgtggtcgcgtttgcaaaggaagagagagtatgggtagcttggcattcattccagcagaggagaggccactagctttggacattcagtccttggctaatagacttgtgaggttggatatttcagagcccaaccgagttcttgcgtgtgttgttggtcagtcttcattattggggcagatcaaggcccgacagttcgatgatcctcatttggcggttctcagagagacaatgcttcagggtagtgccaaagagttttctattggtgaggatggtgttttgcgactccagggtcacttatgtgttcctaatgttgatggtctgatggagaggatactagaggaggcacacagttcatggtattccattcatccgagtgagacgaagatgtatcatgacttgagacaacattattggtggcggaggatgaagaaggacacaatggagtatgtggctaagtgtttgaattgccagcaggttaagtatgagcactagaggccgggtggcctacttcagcagatgcctataccacaatggaagtgggagcacattactatggacttcgtagttgggttgccccagactttgcggaagtttgatgtagtatgggtcattgttgacaggttgaccaaatcggtgcactttattccggttatgactacttacacttcagagagattgcctcagatttacattcgggagatagtcaggttgcacggagtgcctgtttccatcgtattagatattggccctcagttcacttcccatttttggagagccattcagagtgagttggggacccatatagagcttagcacaacattccatcctcagaccgacgatcaatcggagcgaacagttcaaattttggagtacatgcttagagcatgtgtgattgactttggaggatagtgggatcagttcttgcctttggcagagtttgcttacaacaacagccaccagtccagcatcgagatggctctatttgaggctttatatggtcggcggtgtcgttctcctattgggtggtttgagcctggtgaggctaaatatacggtaaagatttggtgcaagatgccttggacaaggtaaagttgattcaggagaggcttcgcacagctcagtccaaacagaagagttacgtggatcagaaggcgcgtgatgtatcattcatggtttgtgagaaggtcctcttgaaagtatcgccaatgaagggtgttatgaggttcgggaagaaggtcaagctgagcccaaggtttattggcccatttgaggtgttgatgtgagttggggaggttgcttacgagcttgctttacccccagcttattgggagttcattcagtttttcacttgtctatgcttcggaggtatcatgccgacttgtcccatgtgttagacttcagtactattcagctagatgagagtatgagttatgaggaggagccagttgccattactgataggcaggatagccagttaagatccaagaggatttcagcggtgaaggtccagtggaagggccaacagtcgaggaggcaacctgggagtccgagaaggacatgcagcagatatccacatttattcagcacctcaggtacttttctatgtccgttcgaggacgaacgtttgtttaagaggtggagaatgtaacgacccaactggtcgttttgctttttagaaccccgttcccctaaatgaaacttctcgtacttgctttaactaatttacgacttgtggggatggttggttcgggacttggaagagtttgggttggaatatgctcatttgattccttaatattttcttaaaaggctaagtttgaccttggtcaacatttttagtaaacggacccagattcgtattttggcggtcctggacggtccataggaaaatatgggacatgggcgtatgctcggaatcaaattctaaggtccctagcccgagtaatgaatttttattagaaattattaaactaaaattctaaggatttaaaaaaactaaataatgattgatcacattggtatcaggctcgtatgttggttccagagcctagtataggtccaatataacatttaagacttgcccgcaaaatttggtgtcaatccgagtagtataagtacgtttcggcacgttagaagtgaattgaagaacttgaagttcataagtttgatccaattggttttaaggggtgattcttagatttagcgttgttacgggcgttccggagattcgagcgggtccgtttcatgatttcaaatttgtcggtatgtttgggcagggcccgggatccccgagcgtcaatcggacgaggctcgagtgaagttggaaaatttaagaagagttgaagcttcaggttgctgtcataaccgcacctgcgattggtcagccgcaggtgcgagaccgcagaagcggtcattctctcacagatgcggccaaggcaggccaggcccaaaattgcagaagcagctgcgtagaattggcttcaagtccataggagcggtcctagcccacttggccaattccacagatccggcgatcctctcatagtagcaggaccgcagatgcagaaatcactgaagtagtgagcttcattattacgggctctaagtcattttggccatttttcactcacccattgggcgattttggagctcttgagagaggaccttcacctagcatcttgaggtaagtttaccctacttatttctagcttaatacttgagtcttgggtagattaacacacaaagattaaggtaaaatcatggagttagagcaaaacctaggattttgataaaagttagatttaaccatgaagtttgttatgaaatgcattagaaatcatatattattggtccttaggttataaagaacaactttcttcgaaaaatttcggaatccgggcacgtggacccggggtcagattttaggaaacttgtgtttaaggttgtgaaattgcttaaatcgttagaatgcgatcttgtaagcttgtattgactagttcctacctcgtttatctagttttggatcgttcggctccaaattgagagtttgagctcgttcttgatattggaagtacgcttggagcgaggcgagtctcctatctaaccttgtaagagggaattgtccccataggtgatattatcaaataatttgccactaaatgcgggggctacatacgcactaggtgacgagagttcgtgtgtagctactattatgctatgtgatgacccaaaagatcatcacttgttttaaaagtaaattttgtattccaaggccttaaaaacatctttctgcatcacctcaatttgcgtgcgcagttcggacgcgtggcgagaaagccaatatgttaaaatatgtgaaaaataatgaattttgactttaaaatgaatttaagttgacttcggtcaacattttgggtgaacggaccctggcccgtgatttgacggttccagagggtccgtagaaaaatatttacttgggtgtatgcctggaatcgaattccgaggtcccaagcctaagaaatgaatttttaaagaaaattgttttctgaaattatttataggttttggaaatgaaatgtgtttaaaatttgatgctatcgggcccgtgttatggttctggagcccggtacatgtcttatatgtggtttaagtcgagtctgtaaaatttggtaagaaacagacttgaaatgatatgaatcggaccttatttgaggaaattggaaaatttgttgttcttaagaaatttcatgattttgatgctaaattcatagttgttgttgttatttgagtaatttgaatgcactagcaagtccgtatgatgtttttaggttggtggacatgtttggattggagtcccgaggactcgggtgagatttggataggccatagagtagaattagacttggaaaaattgcaggtttcagctgttctatgggggatcggggcatcggggcataaattcttaaaacgaccgaccgggttgtcacatccttctacactaaaacattcgttcgtcctcgaacgagcatagagacatatttgaagtagtgaaaaggtgagggtaacggctgcgcatatcctgcctggtctcccaggtcgcctcctcgaccggctgaccccgccactgaacgttcacggatgcaatattctttgacctcacctttctaaccttcctatccaatattgccattggctcctcaacataggatagatccttgtccaactggactgaactaaaattcaacacatgcgacagattaccgtgatacctctagagtatcgaaacatgaaataccagatgaattcctgcaaagctgggaggtatagcaagctcataagcaacctccccaacatgcctcaatatctcaaaagggccaataaaccttggactcaactttcctttcttcccaaatctcataatgcccttcataggcgaaactcgaagcagaactcgctctctaaccatataagaaacatcacgaacctttcgtccgtgtaactcttctgtctagactaggctgtacgtagtctatcttgaatcaccttgaacttctccaaagcatcctgaaccaagtctgtgcccaataatttggcctcacctggctcaagccaacccaccggggatctacaccgtctaccatataaaacatcatacagtgctatctgaaatgctggactaatagctgttgttgtaagaaaactccgccaatggcaagaattaatcccaagaccctccaaactcaatcacacacgcacagagcatatccgcaagaatctgaatagtgtgctcggactgtccatccgtctgaggttgaaatgttgtaatcaactctacccgagtacccaactcatgctgaacggccctccagaaccgtaatgtgaactgagtacctctatctaaaatgatgaacactagaataccatgtagacgaacaatctcccgaatatagatctctgccaaccgctctgaggaataagtagtacacataggaataaagtgagcggacttgatcagccgatccataaatcacccaaatagcatcgaactttctcaaagtccgtgggagcccaactacaaagtccatggtgatccgctctcacttccactccgaaatctctatctgctgaagtaacccaccaggtctttggagatcacacttcacctactaacagttgaggcaccgagctacaaatccaactatatctttcttcatccatctccaccagtaatgctgcctcaaatcctgatacatcttcgtggcagtcggatgaatgaaatactgcgagctatgggcctcctctagaagcaactctcgaagcccatcaacattgggtacacaaatccgaccctgcatcctcaataccctataatcaccaatagtcatatctctggcatcactgttctggaccttatccttgaggacaagcaaatgagggtcatcatactgctgctccctgatacgatcaaataaggaagaccgagaaactacgcaagctagaacctgactgggatccgaaagatccaatctcacaaactggctggctaagacttgaacatccatcgccataggcctctccgatgctggtaaataagccaaactccccaaactctctgcccggtgactaaaagcatcggccaccacattgtccttgcccgggtgatacaaaatagtgatgtcatagtctttcagcaactctaaccacctcatttggtgcgaatttagatccttttgctcgaacaagtgctgcaagctctgatgatcagtataaatctcacaaggcacaccgtataaagaatggcgccagatcttcagggtgtgaacaatggccgctaactcaaggtcgtgaacagggtagttcttctcatgtatcttcaactgtctggacgtgtaggcaatcaccctaccgtcctatatcaacaccgctctgaggccaatcctcaaggcatcacaatagactgtataagaccctgaacctgtaggcaatataaaaaatggggctgtagtcaaagctgtcttgagcttttgaaagctcgcctcacactcctctgtccactggaacggagcacccttctgggtcaacctggtcatagggctgcaattgatgaaaatgcctccacaaaacaacgttagtaacccgccaggccaaggaaactgaagatctcggtagctaaggatggtctgggcaactctgcacggcctctatcttcttcggatccatttgaataccctcactcgataccacatggcctaagaatgcaactgaatccaaccaaaactcacatttctagaacttagcatataacttcttctctcttagagtctgaagcacaaccctcaggtgctgctcatgatcttcccgactccgggaatataccagaatatcatcaataaagacaatgatgaataagtcaagatacggccggaacacactgtgcatcaaatgcataaaggctgttggggaattggtcagcccaaatgacataacaaggaactcataatgaccataccgagtcctgaaagcagtcttcgggatatatggctcccgaatcttcaactgatggtaacctgagcgcaaatcaatcttagagccctgaagctggtcaaatagatcatcaatacgaggcaaaggataacagttcttcactgtaaccttttaactggcgataatcaatacacatacgcatagaaccatcctttttcttcacaaacaagacaggagcaccccaaggtgatacactgggccgaataaaacccttatcaagaaattcctgtaactgatccttcaactccttcaacttagaaggagccatacaatatggaggaatagaaatggtctgagtgcttggcaatagatcaatgccaaaatcaatatctctatcaggcagcatgcccgaaaggtcagctggaaacacatcgggaaaatccagttctactggaactgaatcaactaaaggggtatcaatactgatatctctcacataagctaaatatgcgtcacacccttctcaaccatacgctgtgctttaagaaaagaaataactctactgggagtgtgatctaaagtacccctccactcaacacgcggtacgcctggcatagctagcatcacggttttggcgtgacaatcaagaatagcataatggggcgacaaccagtccatgcccaagaaaatatcaaagtcaaccatgctgagtaacaataaataggctttggtctcaaaactactaaaagaaaccaaacacgaccgataaacgtggtccacaataagagaatctcccataggagtagaaacataaacaggagaactcaaagaatcccgagatacacccaaatgcggatcaaataagaagacacataagagtaagtagagactagattgaatagaaccgatgcatctctatgacaaaccagtataatacttgtgatgacagaatcagaggcaacaacctcggtactggtaggaagggaatagtatctggcctggcctcccccctagggcgacctctacctccccgacctccacttctagctggctgagcaggtggggtaactggagctgtaaccatatcctgagaactctgtggggcacactgtggctaagaagtctgtggaggtgcacccctcccaagtctggggaaatccctcaccatatgacgtgtgtcaccacactcaaaacaagctctgggaggacgtggtggctgtgactagctcgggccaggtcttggactaaccccggaaagcaccccgcacagaaggcgtgctagataccgatggtgcataataaggctcttgaggtctaggaggagctggaatactactggctactggaagagctgaaagaacagggcgactcatataacccctacaatgacgacctggagctggggcacgggcactagagaaatggcccgactttcgagacctcttggcctccctctcctctctctctctctctccctggcatgcataccctcaatcctcctagcaatgcccgcacctgctgataagaaatatccatctccaactcacgagccatgctaacctgatgatgggaataaagccctcaataaaccggtaaaccctctcgcgaacagtagaaaccaaggctggtgcatgactagccaaactagtgtaacagactgcataatatgagatagtcatagtaccctggcgtaaatgctcaaactctgcgcgccatgcgtccctgaggctctgaggaacatacactctcaagaacagatctgaaaactgagtctaagtcagtgaagcagcctcatccagactgtgtaactcataaatgcgccaccactcataagtggctccttgaagctggaagatagtgaagaaaacctcgctcgatccggatatacccatggtacagagaatgcggtaactctcatctagaaatcctagagcatcctccgatgctagaccgttgaatataagaggcttgtacctcttgaacctctcaagccttagttgctcctcctcggaagccgctgccctgccctcgggctgaactggcactgcaagcggtacaagaataatctcagggacctgctcaacatgcactcactgctcaggggtacgagcggcgggagtctgtgctcctcccccggcctgagatgtagctgcagcaaggggaagcaaccctgcctgagccatagtggtgtacatgcttatgaattgtgctagagtctcctgaagagctggagtagttgtagcagtaggcgtgtcaggtgcctggactccggctggaactgttggtggtacctcggcggcagctcgcataagtgctctggctgcaccacgtgcgcgtcctcggcctctaccccagccccggtctctgacggttgcaatagggggcacgggtgcctgataatctcgggtagcatgtgtcctcaccatctatgagagaataaagacagaagtttagaattgtgatgtcaaaatatcgcacgacaaggaaatcaaataaagtggaattttcctaacagttacatagcctctcgtagataattacagatgttttcgtaccgatcagcgaaactttaatagaccggcttgtgatccatgactcctatgaacctatagctctgataacaacttgtcatgaccccggttcaccctccgtgaaccatcgagacagcacctagtcctctacgactagctaagcctaacaaatgctgaacataaacgaaacttgcggaagaaataatcaaaagccaaaataactgaatgaaaacaatagttaaaatgccgctcggcatatacaacacaacattctcagaatcaagtacactatcccaagaaccgaaaactcacggaaccacaagcctttggatatctacaatgtctaactccagaatatctaacaaggaaaaaaaatacagaagggcaaatgttaaaagctagtatagaaagggactcctcggtctatggacgtggcagatgtaccccgaagtctctagagcagtcacctcgccttacaggtggtaggactgagttgcagtatttggatctgcacatgaaaaacatgcgtagaagcaacatgagtacaccacagcggtactcagtaggtgccaagcctaacctcgatcgggtagtaacgaggaaggtcagggccctactgaggttaaataaagtataaattttgacagtgtagaacagaacaatataaataaatacaacagtaaaagtaacacaggatataaaaagggacaacaacaactattacagacacaaggcaaaacacggaaagaaatgcgacttagcaccaaaataacaaccagggatctaccaggataccatcctgtagccccatatatacatatccgatggatcttccaggatagtccaactcatagtgcgcggggatctaccggaatcctgttccgtagtcccaaatgtaaatacccaatacggggggaatctaccgggtgcattcctgtagttccatataattgtgcagggggatataccggcatcccacatcggtagtcccaaaataaaaagacaagggggaactattagaatcccacatccgtagtcccaaaataaacatacaagggggagctaccggaatcccacatccgtagtcccaaataaatatgcagcagcaacagcaaaatatacagaaatgacaaaatttcatattaaggcaacaaatgattctagcctagtatgctgcacataattcaagtaaggtaggttgagcaaataaaacaattaagtcacttagacatgctttcctaagctaacaacaggcataataatgcaagtaataaaaacaggaaaggaacatactagtgattacttaatgaaaaccggatttccaataattagcacaagtacgcactcgtcacctcacgtacaagacatttcaattaccaaatataccaatcctaaggggaaggtcccccccacaaggttagacatgccatttacctcgaactggctcaataatcaatctgaaaccacgctcttgccacgagtactcgactccaaatgacccaaatctattcaattcaatttcataacgtaaataacacttcaagtaactaattctacaaagaaattctaagctaatacgcgaaattaggtaaaataactaaaacaccccttgggcccacgtctcgaaatcgggtaaaatttatattttcaaaatcctcacactctcccgagttcatgcataccaaaattatccaaatctaaggtcaaattcccaatcaaaagtcgaattctaggtctaagaactttcttctaactttttcctaattttcatctccaatccgaaattaaatgatgaattcacgtttgtattaatgagttacaagaaaaaaggagttaagaatcgttacccaatcgatatctctgaaaatccctcaaaatttcgctcaaatccgagctcccaagcttaagttttgataaaaatggctaaaccctcgattttgaacttaaacattctgcccaggcgcgttcttcttcgcgaacgcgaggctacggtcgagagtgaaatgcactaaagttccacacaccagtctccctcttcgcaaacgcgatgcctgagccgcgaacccgatgatcatttctcttcccctacgcgaatgcgagactgccttcgcgaatgcataggcacaaagtccctcagcctcgcgaacgcgtaagctccttcgcgaatgcgaagcgttaattcctcaacatccccagctcctcttcacgaatgtgagaccccacttgcaaacgcgaagaaggaaaccagaactgactgctgcaacatttttctgcaattctctaagttcaaaaatgacccgttgagcatccgaaagacacccgaggcccccgggacctcaaccaaacatgccaaccaatcctaaaacatcattaaaacttgttccaaccttcagaacggtcaaaacaacatcaaaacacctatttttcatcggattcaagcctaaaaattccaaaaactctaaaaatacgctttcgatcaaaaggtctatcaaacctcgtccgaatgacctgaaattttgcacacacgtcacattaaacactacggagctactccaacttttggaatttcattccgaccctcggatcaaaatctcattatcgaaccggaaacttcaaaaattcaactttcggcatttcaagcctaaattcttaaaacgaccggccgggtcgtcacatcctcccctcttgactaaatcccatgatttatttcctcctttttttattgcaggtgtgggaaattaatttaaagtatcttcaaacttcaaagcaataccagtgcaaaaaaccatcagtacagacgacacaaaaatttggcacgcaaatcatacaacatggagagaagatcgtggccaaaaatcatttcaagcatttagcaaacgagaattcaaaaatatatacaatatctatgcaattatccttctttggatttagttcagctaatttatggggaaaggtaaaaagtaataaaggaaccacatcttgattatcctgtgcatcagaatatctatgctatatcctttttccacttgcatatagtaccaaactttttacacttgcatatggtaccaaaaaaaggaataaaaaaaattaaaaataaaataaaattggtcatactgattagaagcataaatcatcttgaagaaaacaagaaatacttcacatctttatctaggttgattaattacttctttgaaatttggaaaacaaaccagctattgagaaagtatacttcataatttatggtcgtatcatttgaaagcaaacaatgattagtatgactactagaagaggtattttcgagtattcatgatctacttgatgtttgctaccgacttaccattttcaagtattttatatgaatgatccataagctacaactggtaagttgttacctatagtgacacttttcaggtaatataaatgttgaatttatgtattagtactatatatgtgttgttacctatatgttgtacttttgataaatttattcactaattgtttggttgaattgaatgaaggaaagtcatggcgttaaatcaaatccaataggtaggatataccccgaaaacaacaatatttttgcgagaggttcaataaatattatgataattattttatgatccatttaaactctaatacaatttagaagaaatattctaattacaaatggttgtatttcatatagatgctacaaataattgataaagcttttacactgatttgagatttgtacacttatttaagaaagcaaatttgatttgctaagttgcaaattaactgtgtacaactttcttggcatgtgattgaaattaaggcttgagaatgaatctcaatattgtttagcctattatgtcattgattgagggtaagacatcgggatcaagtcctgatgctccataatgataagagttgggtttgagtcccaatttattatggcctaacatgcctttatattggtaagacattgggtttgagtcccaatgtaccatattgatgatataatgatgactaaagaaaaaaaatatttttcatgaaaaggcatgaagattgtcccacttgattagcttcattcttgaagtgaatgtggtagcagtgcatataactctaaatgaagacaagtggttgaacaatgaacgtgagcgttccaaataataataatcatcacaatgattataaaaggagaacaacaagggttctcaaaatagtccttcaaaatgtgaagacaatgtttaccatcaaattggtatgaagcacatcgctgattatgatccattccttgaagagaatgtgacttgtgataagcattgagaatgcagattcattcctaaaggtgaatgtagtaatatgtgataaaagtaatgaataaagacatgcaaggcatgattggatgaataccacacaactcacctttgagggaggtttgagagaaataaagagaataaatattattgtgtggttacatgaatatgtcattggtctcgtacatgtgataccccaaaatattttggcattccttataaaagttattaaaggtaaaattaaagaaaaaaatggcgttgcttataatgattttgaccaagacaatttattatgatataattttcttcgtgaaggaatcatttatcatatgaatggtgtggcaaaagatcttgtagtacaaaaattgttaagagctccgaaaaactaattttttactatctggatgaataaaattattcatgacattgatattgtaaagtttcaaaagaaactttttgagtttcaaatgtataagtcaaagtagttggcatattgagactataaatgaaaggaagattgaatatcttcatatttctataattataccaggtaaatatgaaaggttactcgattttctttctatttgtactacacaaatataagcatgatgctggaatcatatgccacaagctagaggtttactaaaacaaatattagttggcatgaccagttgaccatcccggttcaattatgatgcggaaaattaattgaaaattacattggcatatattgaagtaatagaagattcttcaagaattcccttacgctgcttattctcatgatataccagttaaaagttgggattgaatcccttgatttctagaacgaataaaaggtgataaatatatgggcccagtcacctgccatgtggatcgttttctattatatgattttaataggtgcatctattctatggtgacatgtgcatttgttatcaacttgcagtttggcttttgcaagattgcttgctcaaattattagagcacagctccagaatgtaaattatgatgatttatcttgataatactggtttaaatccatgttggtttagcggaatgcctccaattatagctaaattattggttatgagaacaaaactcccaaaaatgaaatttgatatgagatgtattatgtaatatacaccagaacttgtacgcatctagccatgttatgaaaatttctctctttcacaatcgattcagggtcaggaaccaaataatttctatatagaaatatgaatgtgctatatgatttaattatgccaccacaatgcacaaagatgggttcccaaagaaggttgggaaatatgttggtgatcccaaaattagggggagaaaatggatagctgagaaagtgatatgtgaaatgaattattatgaatacatatagatcctcgtacaagaaaatatgaacttgaagttcaagtgataattaatttataaattattgccagacgcatttgctgaccaaagctaaatgtcatatttcagctgctaatactccaaatagaataacgtccatgagggacatagtctatggcacgcatgaagcgtaacagaccaatcagttccaaagataaaactccttgaagaaggagaggggaaaatgttcgagatggtcataataaggaggcaagtgatctagaagagcaccacgatataacacttcgtaagacctcatgtgagaggctcagttacctgaaaacaatgagataaagagatctcaataagttatgtctttattaggtaataatggaaccgacgtaaagtgatcgtcgacgatattgttaatataatgaagcactcaatattattaatattgacgaggatcttcagctcaaatctgtcatgaaatttggatagataaatgattggccaaaataaaataaaataaaaaatacgcaatcaagattgatttcacctgaaaaatgtgaagttggacggatagtccaaacacctgaaagtataaagccagtgaaggtataaatgtgttcttgtaagaagaaagacaagtcgatagacataaagacgacttgtgtcacaagaagatttataaatatcctggcatttcaggttttaatctggcaatatatgaaaaacttgatatgcgtataatggaaattattgaaggatttaaattgttctgaagcatattatggtttccaagtttattaaataaagcttcaataatccttatacgcattgaaacaatcagcgcgcatatggtataatcgcccaagagagtacttgttgaaagaatggtacaagaataattcaatttgtccttgtgtctttataaaaggatctggatttgaatttgttataatcgtcgtgtatgttgatgattcaaatatcattagaactcccaaggagcttcctgaagcagtagactgtttaaagaaagaatttgaaatgaatgattttttaaagacaaaaaataaaattttgtcttggcctacagattgagtatatgaaagatgaaatttttgtccatcaatcagcatacactgaaaagattttaaagtgattctatgtggataaagcacatccatagagtaccctgatgattgtgaggtcactccatagagtacacaccctctagagttccttgtaggagtagagctttatctcgctaagacattaactgaaaaagttttgtcacgccttcaagaaactagtgttcaagattgggatgtgaatgatcaaggatgtgaattggtgctctcatcagggggagttgatatgcgttgtactcttttttccttacaaggttttggcccactgggttttccttgcaaggtttttaacggggcaaccaaaatgcgtatttctaaacctgtgtactctttttccttcactataattttttttctatagggttttttcctagtaaggttttaacgaggcacattatctatgaacatccaagggggagtgttatgataaatatcatattatggtggatgtctactcttcctccatgatcttcatctcaaatgcttaatgacatattcaatgacataatttgtatgttcaatgacatattccctgacatattttcttcactatttatgcctatataaaggccttgtaatagataggaaaatacacacaattgaagaagaaaatctcttccttctctctatctctatttcttgttcacgttttactaaattgcttttatttcataacaaagagaacttatttgcttacttaagaatgaatatgttaggaatgaatatttaactctttcttaaaagtggataaatgactcactttataagatttgccaaatccttacatttctaaacttgccacatctattattaattaatgaccaacttaagcttttgtggaatgggggtgaggtttgctgcacccctgatgtgatgatcgccttctcgaagtaggctctgtaaggcagcattgacaacgttgagcttgtctgtcaagtcgtttatggtttgctgcatggcagtcagtctgtctgcctcatgttgctgatgggctaaatcgtcggcacgctcctgttggaggtcctcaaatttgccatgaatattggcagtttcgatggctgccgtttgtcggtcctcgtcggagtcacgactgatgtttgcaatgtcattttcggcctgccgcattcgtcggagtcataatcatatatggttggcttgctgccgcgttaaggatgagcaagcttatccaaaatattgaattaattacccaattattcacacaattaagaattatcccaaattacttaaagtactattcacttttaatacactttatatatcatacaataacatataatatactttattatcatggtcatgtggtgccatacaaaataaatacatacacttattattttattaaaacatacgtgtaaaaaatgcataaattttctcaacttctaatttttttaatctcacataaagagtacaaattttcgtatccttaattcttaaaatggtaaaaaaaaaataaccttcttttcttgtaagaaaataattcatatctttacaaaaaaaggaatcccataaacttttctcatattaggtgtataatttaaaacatattcgaaagtagtaatattaataactatataaagtcatatttttcaaactatttttttcatcacaaaaatattttactcaaaataccatatcaaatacatatataacggtatcaagtttgttaaagttacagggtgtaacataaattttatgtataataatacaacaatcatctaaatagtgaaaaatattattacattagcataatacataaattcaaaataaaaagacatcatcagaacttacacaaatgatcaatttagttatgttagttagataattatatattatagtttaaacatatttaatatgattgattattttttcaccaaacagttcattgatatccaatatatctgtagaactccgagcaaacatgcgttgcacgatattcccgtcaatcgtataaatttttaaggttagttagtgttatttttattttattatatttattttatgaggaacaaaatattagaatcatatcctcttaataatttttaatttaaaaatgatgttctaagtatacatttccaattttgttacttcccaaatggaaaatcatggtaagacaaataattcaatattagggattgagccgtgagcatttgttgtaaaagtattaaaaaatattagtcatttttagtgtaggaagttaaattcttgtgcgaacacgtttggttgcacgttattcaatcaaagttctacaacaattataggaaataagaagttttatttatcaaagggtaagactttataatatttctattcacaataaaaatagaatatgatgaaaattatgctcctcctaaaacaaatttgcaactttttcttttaatatatatatatatatatatatatatatatatatatatatatatatatatatatatatatatatatatatatatatatatataagtgggcataggcaagatgatttggcatacctctgtggccaagaaacacatttatctttttttttttcctcttatttttcttcttcttcttcttcttcttcttctatttttatgtgccttatttgataacattaaatgactcaataattactgcttcactctaaattctctttattgcgcatctatctcttccttttcttttccccacctctttagtttcttcctaataattataacgtttgaaggtagtaacaacccaacaaaatgctagaggctgtagacacaaggttctgtcagcttcccaacaagcttagtcaaaactcatcatgttccataaggtaattctaaatttcatattttcgccaatacgggaaattttgcaactgcagatgttattataccaaacaaactttcaaactgtgaatgctctcggaatagttccaggtatctttcttgaaaatttcatatatataagatacagatatttaattttttaccgtgaataaatttggaacattatttagtatcatacaaactaaatagtctttagatgaaagtaacacaaatttaatcagttgctcaccaccaacttattttttcattctttttttcgttcttttggaatcttcttttcttgcaggttctttatctgtttgtaattgtaggcttagaacaatactaccttggatgtaaatccatttatcataattttttattttttggtaattcattgatgttttatttttgcctgacaataaatgttcccaagtgttgtttgttctatttatttctcttatatggtggatgccattttatttatcatgtttttgctttttggtaattcattgatgcgttgtgtttgacaggtaattatgatttttaattgatgttgttctttattgtttcattcttctttgggatcttagaagtgaatttctaatttgatttctaatggtataaattttcttgaagtgatagcacgtttttatttattataaatttttatatcaattattttctatttctttttatgtaataattaatacttcccattccctctattttggaatatatataactatattataactgcagtcaaatgattttgtgggccattacaaagttatttttaggtttatgattcggtcttttttttttttttaacttatgggagatttgtttttacacattagagatctatgttttacacataagagatttatcttttacaaataaaaaatctaaaaaaaataattttttaatttcaactgaaaaaaaccgtgaaggcccatctcatgtattttattaaaaagtgtaagcagaaacttagcttgaatgtggtggagatggaactaagaggtaaatgtgccgttatgttcttttggttaaattggaagtgactgaaaagtgatgtgagaaaaattcttggatttactactaattagttgcttctgggaagattgtgaaggaaattaaatgtgtacaagcaggcattgtccgtaatatgttttttttccggactttttagtaggcatttggacataaaaattataaaattcaaaaaaatggtgaatttttttttaaagtgaaaatagtatttgaaatttagaattgtgtttggatataaatttcaatttgggttgtttttgaagttttatgagtgatttgagtgaaaattttgaaaaacaaccttttgcaatttttcaaattttcgaaaatttcctaaatgcatcttcaagtgaaaattaaaatttttatgaacaaacgctgatttcgaaaaaaaagtgatttttttttgaagaaatcttccatcaaattttatgtccaaacgggtacttagtttcgttgcttttcgttttattttcttttatttatttgaatagaagacaagttcatcaaacaaaagttctaatatctaataaaatttaaaaacatcaagtccttagatcatgtattatgaaatatataagactaagagaatcatgtattaatctctctccacaaaaaaatatatgatttttcccttaaaagtttttttttcatttttaagaatatttgataataaaaaatgtagttttctaagctctaattttacaagaacatttatcttgtgatttttttcatcaatatataaaattagttttttagttaaacagctgaaaaattctatctttaattcttaataaatttataaataaaatcctttcgaaatgggctgctatttctgaaatcgcgcgaaacgcgcggcaaattccctagtatatatataaagttggggatagaataagtgatgtggcaccctccattgaccagcattactatttatcttttttgttattttttttagcattttccttaaatttttccattttttaaaatgttctactaagaaaaactgaacacgcttcttttccgttacaagaaaacggtcacatctttaattcacttaattagcctcttcttaattcctcccacctgccggtatttagtacccatttgctacagttttccccttctttaaaattgccaagaaatggttatgaagaagcaaagagcatattaagaaaatggagaggaattggatagtggtcaacgttcctgtgtgatcttaagcgtttcttacagatctgaaaatccataacatgaaaatgaattcttgaaatgactgtattatttttgggtttttgtacttctttttcaccggacatttttagccattcagattaattttcttgtaagtaagccatttgttttgctctttcactttttctctttcaacatatagttttcaatcgtttcaggtggaacattgaaatatctacaagtatagccaaatcaatatccattctttctcatgataatcttatattaatggcaattattcttggtatgtttatcacgactaacagttggaaactcttacactaagaactctgtcctttttcgtttattgtaaaatatttgttgtcaaaactcattaatttgttcacaaactgcaggattgttcaacaatcattgctcatggaataacaatggttttcctctctattcatcattggttctgcagtcatggctgttgttcaactattgctattgaactttgaagtgttctttttcatattgcaattcaaaagtaatatctccaacgaagttcatcactatatataccaagaactggagaaaccacggttgatgctttaaggagaggacttcctctgttagttattataaatttatactttaattcagttaaatttatataatttaccagatttactaaattcttgacataaataaaaccttctttgacaagactttaacgtaatagatagctctatagtctaaactaaacgtgggtgatcttaatgtctttggtcttttgattttggtggtctttgaattttacgtacaccattggaggtggagattaacataactgcatatggatgacactttggtgatgatcaactaacaagatacgtaatcgcaagtataagtatgtgcatatatagaagctttgaccattccaaacatttgtgtgataaatacaggtgtagagaacgatgtggtcaatgctttatagcaaagttcaagaatttgatatttttacgtggggaggctttctgttaattgaaaattttcaattttaaatattatctcttgggattagtgatgttcataatcatatgttagagaataatcatttgtctatttttcatatgtaataaaaattagtcgtgaaatttgtaatatgaggagctttgaaatattttgttgactctatctcacctaaatttacaacaagatcacatcataagttcacctttttatgaccgcacgaagcgcggacagactaactaattctattataatgatgatagcattagtggctaactttttttatttctaaatgtctacagtaataatattattagaaattaatttaattgttatagtgatcacaaagaataagctatgatatttaaaaaatatattccttccatttccataagtttttttctcatcatggtagtctttttcatacgcattaggaagaatttcaaatattctttcaacataaatttatatttacctgcaaaagataatcaatcaactttaagatggttatttctgttctttcttatcctcttctcttattttgtaagatatccatattgattcactttcttttttatggataattatactatataatttgcttatactgtttaatttttacttaaaaggtacgatggaaaaaaacaaaaaggttaacattctaatttaattaaaacaaatactataaaatccagaaaaattaaagaatttgatcttaatcgaaactaaaacatgaagagacaagtcattttgacggtattataaatagatattacataaaagtatagtaaataaataaacacaagagaaaatcttagattctattttaatgagcatgactcattcgttctttctaaactctagatcgtatgtttaacacttttaatttcttcccgccttatagagtaactatgtttacatgtaaaatagaaaataaaagtatgtcatatttacaaattataattaaaacgttaaactcaccttaaaatctgcaagataaaataaaagagtacaatgttgcagatgaaaactcagtattttagcaccacaagaatttgctttctgcaacataagttttagcagtattatcaattgcataattttcctaactcgtaagcacaaaactatatggtagttgctttcatttgatctttgcacctaatcttcatgagtctgttcacagtttttacgatataaaagtaatttttgtttactgaatataaaggaaagagaattcaacgacctatctctaaaccttccatttagttttttttaactaaataatcacgtcgctaaacaaaataaagaatacctacatattttcaaatattatactgatttactaaagtagtaaacataacaatgacttacctgttgcaacttaaaatttagaatagaccaaattaagatattacttaaaaagcaaaaaatataaaaaatgaaaaggacaacatctgtcttttgtgttttaacttttaaataaattttatactctttatgcatagatatatgacatattacatctttttttctatttgttattttttacttttagttgcttaaaagatcacaccagaagaactctcttgctatatatgaagccataaacctaccgtagttttatgactttgaatgtataatagttccttccaatttggagttttgtctttcttcgtttggtttatttaggattcctaagtgtagtcttatgtcctaaaattaataggattacaatattaatgtcaagaatttcagtaatgttcttttattgtgagttattatatttaatattataattttttttttgtaaaccgacattgtattcatactttataataatatagatataaatagacaaatataaatcgatagttttcgatcaaagtgttttttcaccaccaaatttttagaatatgcgacggaccaatccgacgcaaaaccataaaaatagcatcctcgacggatttgtgacggatcagaacctaattgcaaattcctaaatagttcagtgacacctgcattaatagaagtgtacaaggtgccattggcaaggcagttagttacagctacacgaaaaaattttctccttagtttctctatttcactaattcattttgaattatttttctcctttttttttgaaatagtaaacataaaatatggaggtttttttctttccctcaaacctacccctgaaagaaaacatgaaagaattgtgaaaattttcttttccttgtattgataatgtatcacgacccaaaacccagacccggtcgtaatggcgcctctcgtgaagacaaggccagccgacactttccattatccgattattaacaattaagcatttaagataccgtctaaacatgaagaaataaaccaaagtttaagcaattgatagtataatatgtgaaatacagcccaaacacagcccgataccggggtgtcactagtaatgagcatctaaacaattcagaatactacaaatcaaactacagagtttaatacagaaactaagaacataaagaagtatgatagggaagctccgggctgcgaacgccaatagctacctagagactcctcggatccgcctgagccagaatgatcaacactcgggagcgggaccagataagcctgaatttgcacacaaggtgcagggagtaaagtgagtactccaactcagtgagtaataatcataaataaagactgaaagcaggaaatcacgtaaggcacaaaagcatgctataatgaagcagtgaaaatcctttttaaaacagtaaaccagtgaaagataggtaaaaatcatgtaactcaaatttacttcctgaaaagcctttttcaacaattaagcaggtaattgatagtcaattatgaaaataaacacataaaggttaacccctcgggcacagtatcaacaaatccgtccctcgggcaacatctaagaagatgacagtatctgagaacaatactagcccctcgtgctcaatctcgtatcacaatgggtacccgcgctcactgggggtgtacagactcctggaggggccccttacggcccaaacgcaatatcaagccacctcgtggcatcatcactaggccctcggcctcatatcaatcaacccacctcgtggcgtacatatctcaagccctcggcctcataatcagtatcaaatgtttcctcacaacataggccctcgaccttactcagtcaaaaatcctcacaagccactcgagcaatagtaaaacagtgtttctcagtccaaacatcatttaaaatatcatttaagtataaaaactgagtaaaacatggctgagtatgaaaacaatggaaaataacatgactgagttcaagcataaagtcaaaacagtgaggaaatatcaataaaaatcaccgaagggttcaaatagttagcacgaagcccaaatatggcattcagcccaaatagtgatgatagaaaatagatttcagtcaaataggcggtaaaatcatcaatcaggacggaccaagtcacaatccccaatagtgcttgataactagggattttgatacattttatactccttcatgcttaagttttgattagaaatgtgtacaaatagtcccaaaaggctcacaagttgcgcttgattgcaggtttgatcaacaaggtaaaaagatgtcaaagatcagctcaaaaaggagtgaaacttgcacaagtaccaagacaagacaagctcaggcaaaacaaggccaatgcggccgcacaacattctgtgcggtccgcacaagtgaggttcagaaaggctgctattcaggcaaaaaaggcaatgcagacgcacaaggttttgtgcggtccgcactgggatcaatgcggccgcactcgatttagtgcggtcagcagagagaaggttcagagagttgccaattccaagtttgaagcctaatgcggtccgcgcttcatttcatgcggaccgcaccagaagccatcgcaaccacactcgattctgtgcggtccgcattgcccaagttcagagagccgtttattcaagtccagagccctagtgcggccgcatgtgattttgtgcggtctgcactaaccccgtaggggtatttttgtccaaattttttagcttagcataaatagcttctttttccatttttaggtcatcagatagttttatacactggctgcgctcgtgacttcgttatttttagctgttttgagtaattttagctttatttcaacattgaatcttcaagtttaatttagcaattaatgaatgtgaatttttcttcatctatttctttgtccttctctaattatgagtagctagacccataagctaggattgtggctcaaccctagtgtggataattgacggatcttttattttgatgcttgattgtctatgggtgtttgatatttggactaatttcatgtttaattgctgaattagtggttgcaaacactagtttgtgtttagttgactttgactcttcttgagaaagagagcctaagtctctgaaattggtccaacaaggaattggggcgtactcaagagattgatagccccaattaaagggttaaacatagagatagtaatacccaacttgaaccttgattgcttgtacaaatttgcatacccaattggtcatgagaaagtcaattcggaaaaaatcactcgaactactgagaggtgtagagtgagtagaatcgtgcaatggttatatcatactccccaaatgtgacaatcatatcttatactcaagtacccgtcaattgaccacctaggcgaaagtcactaccttagtgccttttaatcatttgaacaactcgcaatagtttaatcctagcttattttagtttaattgatcattgtagttctatacaattagaagtaaaacaaaactcaaaatgtttagaagtgcaattaagagcaaatacataactccactttagatagacacccgactccaacttctagctccatgtggaaatcgatcccgaccttaatcgggtaaaagctgcttcgacctttctcgctactcaatagtagtgtagggttagcttcgatcactttttggcgcgttgccggggagctaacgttttggctatctatctaaatagttttgtgtattgttcttctttccttctttgttactaatttgtttgtgtcacaacttcaggtacaaatggcagcaaaaacgcaatgccctcttggaaatgtgattgggggaggaggtagatgttcgagatgatgaggtgcctctgtacctcaaggacaacgtagaggccgccaggccaatgctaatgaatgaaatattccagaccctcctccgccacctccaagagtggctcctagagtgcttccgaaccaaggctatgcaagtgctattgtcccacccgaatcgggcgggcaattttcaaataaccaatgtgtatgacttgctgagcagtgggtatttcacgggcgctgcaaatcaaaatgcttacaaacatctcaaggggttcgtggatactgttggggagcaagcaaactaatgtgtccgaggatgccttggttgagactcttcccatttcacttagagggaaggcattggattggcttgagcgacttcccaaccattccatcactacttgggatgagttggcggaaagttcattgcaaaattttctcaccggggcatatggtgcattgagagatgagatcttggttcaagcaagacccacgaacctttgcatgagatttgggagcgttatagaacaatggtgaaggaatgccccaacaatgatatgaaggcgatgatccaacaatttctaccggggcattaacacaacaaaccaatgcatagtgaaccaacttgtggggcaacttcatgaagctgtcttatgatgaggcttgtgacattcttgacgagatggctgacattcttggcaaagtagagccaatgtgccccagggtgaccccacggttactcatttgcacaaggagttacatgatcatgggcaggctatagctgagttgacaactataatgaaccaactagcaaaggcacagttgcaacaagttcaaaatcctcgccaagtgaatgctatggaggggttaacatgcttgtcaacaaaagaagacaaagaggcaacaaaaccaagggaattcagagcaatttgacaatgattgtggtggatttcaaatgatggttatgatgaacaaatgaagaggtgcaatatgtaataattatcaaggccaaagggcaattcttccaaccaacaacaatggagacccaaggcaattggggcaatcacaacaacaaggcaatggtaattggggaacaacaaccaaaacaacaactgggcgaatcagaacaacaatcaaaactcaaggaaattggaatggtaatacaaacaattggggtggtaaacaatcaaggtggatggaacaatggaaaccaaggaaacggggcaaggctttcaaaggccccaatgtaccaacaaccgaacaatccccccatttccatccaaggtcctagttcttctagcaatgatatgggtagaattgaaatgatgttcgaacagatgatgaagaagaatgcggattctgatgtcagttgcttcccacaatacctcatcgaaattggaggttcagttaggccaaatctcacagtcttgaatactcgccctaagggtgctctaccaagtatataggtagtaacccgaagggtgggaacaatcatgttatggcgtaactacaagagtggagaggcggtgatgtgaatgcctccaaacaaaagcaaattttgagtgatgatgttgagttgcaagaagatgaagttcctttggttgaaaatgtgattgatgaaatatgaatgaagaagtgaggattgatattcaagatgcgaggtggaaactcaaaatgatgtgaacccgtctagggaacactaatagacatgccggagccggttgtgcctaaagccaaggtcctttgccaaggccacctccccttatcctcaaaggctcgaagcagaaaatgagaatcagtttaaaaagttcattgacatgatgaagagcttatccattaatgtgcctttggtggaggctcttgaacaaatgcgggctatgctaaattcatgaaggacttggtgacaaagaagggtctatggattgtgaaactataaagatgactcaccaagttagtgcaatagtgcattcaatggcccgaagcttgaagatcccggtgctttcaccattccttgcaccattgggagtgcggattttgcaaggctctatgtgatttggggctagtatcaatttgatgccctactcgttttcaaactttgggtattgggcaacctaggccgacttccatgagattacaaatggcggatagaacgatgaagagaccattgggtattattgatgatgtgcttgtccgggtggacaaatttatcttgccagctgactttgtgatcttggattgtgaggtggattatgaagttcctatcatattgggagacctttccttgctacgggaaggccttagttgatgtggaagcaggggaactcaccttccgggtgggtgatgaaaaagtggtctttcatgtgtgcaatcaatgaagcagcccaacagtaccgagtgtgctcttttgtggacctcgtcacaagtgatattgatgacaccagtgcaatgatcaatgtggaggacctcattggaggccgtattgttgaatcttgatgtcaatgatgatgaggccgagtggagtgcgtgaatgctttacatggaatgggctcttactcttatgagcctaggaaattatctttggctcgagaataggaagactccaccaacaaaaccttcaattgaggagcctccggtgttggagttgaaaccactgcctccacacctcaggtatgagttcttaggctcaattctactttgccagttattctttctcttgtcttactaacatgcaggttgatgccacattggcggtgcttcaaaagggaaaaaggcaattggatggactttagctgatattcggggataagcccgcattctgtatgcacaagattattctggaagatgatgcaaagccctccttggagcatcaaaggaggttgaacgaggcaatgcaagaagttgtgaaaaaggaggtgatcagggttagtgtaccccatctctgatagctcttggacttcaccggtgcaatgtgtaccgaagaagggtggcatgaccgtggttgcaaattacaaaatgagttgattcctaccagaaccatccggttggagggtatgcatggactaccgcaagttgaataaagtgacccgcaaggatcactttcctttgccttttcttgatcagatgttagaccgacttgctgggtgccttctattttcttggatgggtattctgggtacaaccaaatcttgattgctccggaagatcaggagaagaccacattcacttgtccataggcactttttttctaggatgccttttgggttgtgtaatgcaccggctacatttacggtgtatgatggccattttcaccgatatggtggaagacattttggaggtgttcatggacgactttatgttgtggggattcatttgatgatgcttgaagaatcttgatagatttggcccgttgtgaagaaaccaatcttgttctcaattgggagaaatgccactttatggtggaagaggcatagttcttgggcataaaatttcaaagcatggtattgaggtagacaaagcaaaaattgatatgatttcaaggctccctcccctacatctgtcaagggagttgaagttttcttgggcatgggggttctcggagatttatcaaagacttttcgaaggtagtgaatcccttgtgcaagttgttggaaaaagatgcaagttcgtgtttgatgaaaatgtatgcaagcctttgaacttctcaagcataagttgaccaccactcctatcattaccgcacctaattagagcttgccctttgagctcatgtgtgatgcgagcgacgttgtggttggagcggttttgggtcaacgagtgaacaaaatgtttcatccggtgtactatacgagcaagacaatgcatgatgctcaagtgaactacacggtgactaagcaagagcttttgtctattgtgttcgcaatggaaaaatttcggccgtatctcatgggtgctaaggttattattcataccgatcatgccgcactccgatacttgatgacgaagaaggattccaaagctagactgatgcgatgggtcttgttacttcaagctttgaggaggaggggaggcctcgtgatggcctagaaagcaattattcatttcccgacgaacaactcctttcggtgtcgatgaatggaatgctatagtttgcagatgttgctaatttccttgtgactggtataatcccgtgtgagctctcttctaaccaaaagaagaagctcaagcgagatagtttggatttctattggtatgagacatacttgttcaagatttgcacggatggtgtgatccgaaggtgtgtcccagaggaagagaaattgagtatcttggaggtttgtcattcctctccctatggtggccataatggcggggcgaggacgacttccacagttcttagttgtggattttattggccaactttgtacaaagatgcaagtgaactcgtaaagaggtgtgacgaatgtcaaagagggggcggaatttcgaagaaagatgagatgcctctcaataccatccttgaggtggatatttttgatgtatgaggcattgattttatgggtccgtttgttagctcatgtgggaacacatacatttttgtggcggtggactatgtttcaaagtgggttgaagccgtggcttttcccaactatgaggcgcagagtgttgttgcatttctcaagaagagcagttttacaaggtttggtactcttcgtgcaatcataagtgatggggggtctcatttttgcaatagagcttttgacatttttcttgcaaagtatggtgtcaatcacaaagtttctactccctatcatcctcaagcaagtggtcaagttgaagtctacaacatggaaatcaaaaagatattgtcaacgacggtcaatgcttataggatcgattggtcaaagaagttggatgatgctctatgggcttataagattcttacaagactccgattggtatgtttccatatcggttggtgtttgggaaagcttgccatctaccggttgagttagagcacaaggccatgtgggccttatggaagctaaatcttgaatgggatattgcagccaatctctgtgtggagcagcttaatgaactcgatgaatttcgattccatgcctactccagttcttccttgtacaaggacaagatgaagtaccttcatgataaatatgctcgtagtaaggatttcaaagtgggtgatttggttctcttgttcaactcttggttacgtctgtttccggaaaagcttaagtcgaaatggagtggaccttttgaagtggtatgtgtgatcccgtttggtgcacttgatttaaagaacaaaaatggggaagttttcagagtgaatgggcatagggtcaagcactacttcggcaaaactgatgatagccacatggtggcacttcttcatctcaaatgatttgatggtaacttgcgtcgtgctgcgacgttaaatcagacgctttttgggaggcaacccatgtgtttttcttcttgtttttctttgattttcattgtaatataggatttatttttaggttgaccggttgtgagatgttacatgtttgtgtttatgcagtgcggcatatggtggaaaaattattcaagtctctgaagttttcaatgcggaccacactacattgtgtgcggccgcaaataactcagtgtggggggcacaaaatcagtgcagaccgcattgataaaggatgaaaatactagctctctgaagtttgccaccgcggccgccttgtattttgtgcggtccacggtgcctcaatgcggaccacattaccattttgtgcggtccgtggtgcaattgttcagagagtgggtagtctgaacaccacctctatgcagacagtattagcatttttgtgcggtccgcattggcctctatgcgaccgctttatattttgtgcggtccgcactgtgcaacatctgctactgtctgcatctttttattttctacaattgtgaacttaatttcttctactgatactaacaagtctaatggatgttgtttgcagacaatggtgaaacaagaggcaagggttctaaacaaccaggcaggggagagtcctcccggggagggaaacagaagatgctaagattgactccccaagcccgacaaaacattaaaaacacaaggaagctcactaaagctgctgataggtccattgaccagtctgggagtgaatacgagccctcccgagatatatcttcagactcaatcccagagtacatccctgactggccggagagaaacagactaagagacactcttccacctttccccactgtccaagcgtcagtaaatgtatcttctggttcgtctgagggctcagctgaaggtagtggggatgaatactccacctctcccacaacttcattatccgaagagggtgtagtaggggaagaagaggtagtaggagaagggggtcagccccaggttggtagggtagaacgaactagaaatccggaggtgtggcaagaccactttgtgagtgaggtggcctaccataaattcaaagaatggtggcctgtgaggaaattaatttcggagagaatttttgtagatagaaaccttttgcctcacaaccccaatgtgagaaggcaatttagagatagagtgggctgggagtatttcttaaacaattgtgaggatgcaaacgagcacctagtcaaggaattctacaccaatgttgcccacatcaagaagggcaccaaagtgaccaaggtgtgcaatttgaaagtgttgtttgataggaaaacaataaatgactacttggacttcgatgagaaggatgagtcgctgtatttggaaaagatggaattaggtgaggaggtctgtccttggttggcacagtatctggcaaacccaggtatcacccccgattggttgaatgcgggagtgaaaattttgataagaagtttgaatttcgaggccaaggggtgggaaacatttgtgtgtagcagattggaccccactactcatgaaaactcactccctcttcaccgggcagtattggtagcatcaatcatggtagggtacccaattaacgtcgggaaggtgatgtctcgggtgattacacaggtagttagtgaaggtgatagaactaacccttccctagcttcttgaccatgtactttagggaccgcaaagttgaaaagcggccatttgatatcaaggtaaaagcaaaggccccgttctcatggtataacatacagggtgatgacaacccgaaaggcaagaactacaagggaacatccactgatccaactggcaagtctgaagagccagttgtggtagtggctcctactcatcttgcctccacctcaatggacatccaccctggtccatccattttagcagctctagagataccctctacctcggctcatccagtgactgcacaatgtctaagccagacccttcttagcatcaacagttggatgcagacagcttcctctaagttgtttgccctcactactgcagtagcatctcagtcgacacctccacctctacaggtcctacagtctatgaggatgccctcaaggatattctggacaactagaaaaaaattcttgacactcaaaaatttcttacggacgctgtggagtcatatggaaaagctctcaaagagcttgctagggaggccaagaagatgagaaagacgcgggcttccaaggagtccgtgaaggagttgagggttaaggttgataggatgaaggcagaaagacgctttggatttattgctacaagaccctgtgccaacatctcaccctcagctagagcagtcccagaggcctcccaagaggaagaggatgattccccgagcagatgatgcagtcatccagttggcagacctaccggagacctcctctagtcagtcgtaggatgcagcccaggagcctgtctaggtctaggcctaggtcccagcagtagagcagtaggccatagggaaccagtctgaggttcccgagcatattaaggatccagggaccactcaggatcccatgcagacagacgggccatagagagtctctatatccttttcccttttattcttggtgcttattttgtttagttggcattgaggacaatgccaactttcatttgagggggtagtctctacttttattgatttggatgaatgtatatattcgacagattttaagatttctttctttttatctttggtatgtatataattttagtacttcattacattttttcattttttcgtactttttactttgggtctgtatataaagtttatgttacattgtatatattcatcccctctattgtatattcgattaaattccctcatgtaaatatttattttactttctgcatttttcttttctgtagcttcttatttatgttcgtagcttcttgttttgaatgtttgcaataagcctttggttttcttaatgccacgattctttccaaaggtggagtttgtgtgaaccgagtagctcttcccatttatggatggcgtgacaaccttcttaagggtttgagtccgtttttcgttttgcttttagtagttagtggtaagggtgcctcaagcaaagcgtcacttgggcctagcgcatttgacctcatggtcaaaaacaaattgttgtgtttagggtggtgaaagtcgtgaccttgagactcttgtgttgaccgataatcatcaagtggtgtttcgggactattgtgtgctcgaatcttatctaaggtcgttgtgggccccgactctgtgtctttagcgatcccatagcttgtgtggtgagaaattgcattgcaagtccaagtcccgagccattggtctagaacttgccctgaatgtttgttagaaatcctaagtgaattttgacttgagacatgattataggctctccttgatccaaatgatagcttgaacacttccatacctaccaatgataaatccctagtcaacccttttgagccttgacctttttccttcaagaaccatgatacaagcctttacccgttctaaaagatacctctcttggcacccatctttccttagcacatggcaaaagtataagtttgggggagagacgaggatgcaacaaagtggtaaaaaggtacaaaatgaagaaaaggaaaggcaatgaaaagaaaaaaacaaaaagacaaaagaatgttcaatgtagaatgaataaaaagggattcaagaaaagcaaagaatgaaaggtgtggaaagttgagaaaggagaaaagatttgaaatgtataagaaagagtgacagtgtgtctctctaaccccttagaaagaagtgaaagactcaaaaagtcaagtgaatgtggccaaatgaaacaaaagaagtgcttaagggaagatggaacctacttagaccaaacattcctaccctgaaccaaaagccttcactatgtctccacaaaagccctatatgatcttagttgaatgaacttacattagtggtgactcacataaggggcaagcatatggtacttagagccggacttgtgacttttccttgagagagatgagtgatttccattaacctcgttctgagtgccactattctaaaggtgaggtttcttagggagagttgaggatgtgtgagtttgggttccacaatgaccaaagtaatagaaagagttctttgatgtgttgagtcaactcttgatgctcttgtgttgcacttaatccatggtatttaaaagagtaaatgttgttaatgattcatttgtattgagggcaattgttagtcccaattgatgctagataaggtcactttaggataactgaattctcttggattttctcttaaggggtgagtcttattttgttcgcttgaggacaagcaaaagcttaagtttgggggagttgataactagggattttgatacatttaatactccttcatgcttaagttttgattagaaatgtgtacaaatagtcccaaaagactcacaagttgtgcttgattgcaggtttgatcaacaaggtgacaagatgtcaaagatcagctcaaaaaggagtgaaacttgcacaagtaccaagacaaaacaagcttaggcaaaatagggccagtgcagccgcacaccattctgtgtggtctgcacaagtgaggttcagagaggctgctattcaggcaaaaaaggcaatgcagacgtacgaggttttgtgcggtccgcactaggattaatgcggccgcatttgatttagtgcggtccgcagagagaaggttcagagagttcccagttccaagtttgaagcctaatacggtccgcgctccatttcatgcggaccgtactagaagccaccacagccgcaatcgattatgtgcggtctgcattgcccaacttcagagagccgtttattaaagtccaaagccctagtgtggctgcatgtgattttgtgcggtccgcactaaccccgcaggggtatttttgtccaaaatattcagcttagtataaatagcttcttttcccattttaggtcatcggataattttgtacactggctgcgctcgtgacttcgttatttttagctattttgagtaattttagctttatttcaacattgaatcttcaagtttaatttagcaattaattaatatgagtttttcttcatctatttctttgttttcttctctaattatgagtagctagacccataagctagggttgcggcttaaccctagtgtgggtaattgatgggtcttgtgttttgatgcttgattgtctaggggtgtttgatatttggactaatttcatgtttaattgctgaattagtggttgcaaacactagtttgtgtttagttgactttggcttttcttgagaaagagagtccgagtctctgaaattggtccaacaaggaattggggcgtactcaaaagattgatagccccaattaaagggttaaacctagagataataatacctaacttgaaccttgattgcttttacaaatttacatacccaattggtcttgagaaagtcaatttggacaaaatcactcgaactaccgagaggtgtatagtgagtagaatcttgcaatggttgtatcatactccccaaatgtgacaatcatatcttatactcaagtacccgtcaattaaccacctaggcgaaagtcactaccctagtgccttttaatcatttgaacaactcacaatagcttaatcctagattattttagtttaattgatcattgtagttctatacaattagaagtaaaacaaaacccaaaatgtttagaagtttagttaagagcaaatactcaactccactttagatagacacctgactccaacttctagattcctatggaaatcatcccgaccttaatcaggtaaaagctgcttcgacctctctcgctactcaatagtagtgcatggttgtcttcgatcagtgctcgaccccacattcgtcaccaggtgtgtgtctcacctcaatatagcaccacgatgtgcgaatccgggatttcaacccctcagaacatcatttacaatcattactcacctcgaatcagtcaaatctctagctcgcgactcctttgctcctcgaatcggcctctactcgcatcgaatctatccaaaatcagaacgaggacgtcaaaatatgctaagggaatgaagcccgagcgaaaataatcaatttacaacataaatcccgaaattaccaaaacttgacccccgtgcccacatcttggaattcgataatttttacatcaatagattccttatctccccacgagttcatacatataaaaagttctgaaatccaaccttaaatggtccttcaaatccccaatcaaaagtctaaatttccaagccctagtttttcaatttttggcttaatttccatgatttactaggtggaattaacattagaatagatgttgcgaccattttcctttcaagatttctgaaatcagttttgagttgttgattgtcatgcaacaatttcttcaacaaatcatttgtactttcttctacctgttgggtggcctttgaggttgattgaaatttccttggggtctatattgattctgatttaattgatttccatcctaagagaaattaggatgatttctccaatttgcattgtaagtgttcccatattgtgcctgttggttcatcggacctctgctttgttgtctcacataataaatagattcaggattcattggccacatgtcacttgtatgattgtcaccacacatttcacaacaaatcgacatttgttgaacatgttgcaattgttgtgtctagttcattgtcattctattcatttgatttgccaattttgctatatctgctctcatggctgaaaaatcatcaagttcaagtacccctgctgctttctgtttcattgctctccttggttctccctcaccttgccaattatgatcattaacagtgaagttgtttagcaaaagttgtatttcactatatagtctcgccatgcaactacgtccacaagctgaatcaagattcatctttgaagtctcatctaatccatcaacaaaagtatggcccaatatcatcagtttgacaatgatgtggacagtctcggagtagtttcttgtatctttcccaagcttggcgaagagtctcaccatcccgttgttgaaacccaagaatctggctccgcaaaggctttgtctttttagtggggaaaaacttgattaaaaatttctttgataaatcatcccaagtatggattgaattagcaggctccttctgcaaccattctttagcttcccccaacaatgaaaaaggaaacaaggttagcctgacatagtccttggaaacatttggaaagttgtaagtatccgtgatttccaaaaaattctgaatgtgcctctgcgggtcttcatgagatagacctacatattgcctagtggactgaattagctgtaccgtgtactgtttaagctcaaagtaatcagtgatatcaggcttaacaatagcctgagtcatattagcaagatttggccttcgagcttctatcaccgaacgccctccattacctgccatcactattggctgtggttgaactaaaatgcccaactctctttctgttttgtatctagcttccaactccttcctctctctatgaagtgatctttcaatttcaggatcaagagggaagagattgcttgttcttctactcctccgcattcaagagaagagcctgcgtggcacaaacaatgtgaactgaaaattaatacttaaaccaatggctgataaaagcttaacttagtcaagtagctaatttccaagtccccggcaatggcgccagaaacttgttgcgaccaaagcactcacgcaagtgtacgcgatcttcaagtaatatagtaataagtagagtatcgttcccatgagggcttatgattaacttaacgactgatgcaaacttaaacaattatcgattcaagctaattcatcacaaaatacataaataaccaatttacaatttaactagtagacaaacaataatacaacgcaaagttactacgccacttatgagtttttcttttaacaattaataaatgagatatcccggggttatgggcttgatagagatcatgctacgtttttagcttaaaaatgatttattgaattatccgggttattgattatagggttaataatacccagaagaatctatcgatttcttatgcgcctattcaagttaaatcaatacctatatttctatggtattaatattaactcaaatgcatttacaaatcctatttctcaaccaaacaaggcaattaagtatagttctatcttaattgcgaatctttcacccgatgcccaggatccagatcttgctctatttgattctatatgcaatcaacaatttcctttttcaagtttaactcaagattcgtaaatagtatttcattgttagctacgtagtaaaataattaacagcagaatcaaataaacaacccttaacgataatttcaagatcatcaatctaagtttcaaacaacataatcatctaacacccataaccctaaaatatttgggtttttagccactcataattatacaaacatcaaataaatagatactagaagaaagtttagaaaaacacttttaatccttgatccaaagtattgtctcctcttgattttgatcctccaagatggatctcctcgtctctttctctctcaaaacaggtctggtccatcaataatggatgcttttctctttttaatcgtgtgtgaaggggttttgacaattatgcctttttagaccgaaatagagtaattctgcaattttttcacgtccgcagcgccccccgcagcgtgtacatggattggacagaggcaaaatgcattttaacggagaaatacaatgcagtgcagattcttgcactgccacggcgcctcccacggtgcgacagtgcaaaattttgtgatgcttcattttttcatttgttttgctatccgggcttgctttgcgacccctgaactcgatcctgacttgatttatttagcttttactcagacttcaaagccccaaatcaattaaattcatcccaaatttatttcttaagtcggattaagctcaaacttttgtaaaatgcaataattaaagtgttgttacaacgactaaaatacgagtttttagcctatgatcaatcgagttttaattccaataatcttacctccaagtgattcccttgaatcactcttcaattcccttcaaaaagctctgaaaacgaccaacaatggaagaaataaatcccacattcgcggacaagacgaccttttaaaccttctgcccaggactaatttccttcatcgcgatcgcgggacatccttcgcgatcgcgaagtacaaatcctcagctcccagaattaactgtatgcgaatgcgtaacatcccataagaacgcgatgatcaagctcccaacactatgtgatcgcggactggctaccacattcgcaatgaacaacttcaatccaaaacccttggtccacttaactctacgcgaacgcgacccattccccgcgttcgcgatcaaaaatgccttcaccctatgcgatcacatccccatcttcgcgaacgcactgagtaaactggactgctcccactacaactctacgcgatcgcgagactccttacacgatcgcgaagagtaaaagctctgcaacggctaaaccataatctgcaacatctccaaggcatgaaattgtccgattgatcatccgaaactcacccaaggccctcgggacctcaaccaaaggcaccaacatatcccaaaaccttattcaaacttgtaccaatctttaaaacatgtcaaacaatatcaaatcaaccaaatcactttggattcaagcctaagtttctaaaatattccgaattctgcttttggtcaaaaacccaagcaaaccacgtccgaatgacctgaaattttgcacacacatccgaaacgacacaacagaactattgcaactctcagaattccattccgacccctatatcaaaatctcgcctactaatcggaaatccccaaaatatcaacttcgccaattcaagcctaaatctactccgaacctccaaaactcattccgatcgcgctcctaagtcccaaatcacctcccgaagctatccgaactatgggaattcacatacgatccgtataacacataagtcaacaatccagttgacttttccaacttaagcttcctcaaaagagactaagtgtctcaaaccttaccaaaatcattccggattcgatccaactaacccgataccacataacacggatacacaaagcataaagtagaagaaataggggaaatggagcggtaactcatgagatgactggccgggtcgtcacatcctccccaacttaaacaaacattcatcctcgaacgagtaaagaaacatacctgaagcctcaaacatgtaaggatatctgctctgcatctcccgctcggtctcccaggcagcctcctccacagaccgacctctccactgcactttcactaaagctatatccttcgaccttaactttcgaacctgacgacccaaaatagctactatctctacatcataggtcaaatcatcatccaattgagccgtgctgaaatccaaaacatgagacagatccccaatatacttctggagcatagaaacataaaataccgaatgcacactcgacaagctgggtggcaaagcaagctcataggccgcttccccaatcctccaaagcacctcaaaaggcctaatgaaccgcagactcaattttcctttctttccaaatctcataacacccttcatgggcgaaacttttaacagaaccttctcactaaccatgtaggacacatctcgaaccttcctgttagcataactcttttgcctcgactgtgctgtacgaagcctctcttgaatcaccttcaccttctacaaagcaacctgcaccaaatctatccccaatagcctagcctcaccgggctcgaaccaaccaactagagatctacaccgcctcccatacaaagcctcatatggagccatctaaatactcgactggtagctgttgttataagcaaactctgcaagcggtggaaactaatcccatgaccctccaaaatcaatgacacaatcatgcaacatgtcctccaatatctaaatagtgcgctcggactgcccgtctgtctgagggtgaaaagttgtgcttaactcaacctgagtacccaactcttgctgcacagacctccaaaactgcgatgtaaactgagtgccctatcataaatgatggaaacggggacaccatacaaacgaacaatctcccgaatataaatctctgccaactactcagaagaatatgtagtacatacatgaataaagtgcgcggacttggtcagacgatccacaatcacccaaatagcatcaaattttctcaaagtccgtggaagtctaacaacaaagtccatagcgatcctctcccacttccactcaagaatatccatctgctgaagcaagccacccgatctctgatgctcatacttcacctgctgacaattgagacaccgagctacaaatctcacattgtctttcttcattcttctccaccaattgtgctatctcaaatcttgatacatctttgcggcacccagatgaatggaataccgcgactatgggcctcctccagaatcaactctcgaagcccatccatattgggcacacaaatccggccctacatcctcaacacctcatcatcaccaatggtcacatctctggcatcatcatgctgaaatctgtccttaatgacaaccaaatgtggatcatcatacaagctctcactgatgcgatcatataaggaagactgagaaaccacacaagccaatacccgactgggctccgaaatatctaacctcacgaaccaattggccaaggcctgaacatcaactgcaagaggtctctccccaactggaatatatgccaaactccccatactcactatctttcggctcaaagcatcagccaccacattggcctttcccggatggtacaatatagtgatatcataatccttaagcaactccaaccatctttcaaattaagatctttttgcttgaacaagtgctgaagactgcgatgatcagtgaacacctcacaagatactccatacaagtaatgcctccaaatcttcaacgcgtggactatggaagccaactccaaatcatgaacagggtagttcttctcatggggattcaactgacgagaagcataagcaataactctgccctcctgcatcaatacacaaccaatcccaactctcgaagcatcataatacatggatatgaacctgaagctgatggcaaaaccaatactggagttgtggtcaaggctgtcttgagcttctaaaagctctcctcacactcgtctgaccatacaaatgaagcactcttccgagtcaactttgtcaaggcgatgtgatagatgagaatccctgaacaaactggcgataatagcctgccaaaccaagaaagctgcgaatctctgtagctgaggacggtctgggccaactctgaaccacctctatcttcttcggatcaacctgaataccttcgctagataccacgtgccccaagaaagccactaaactaagcaaaaactcacacttgaagaactctgcataaagcttctcctctctcaatctctgcaacacaactctcaaatgttccgcatgctcctcctgactacgcgaattccccagaatatcatcaataaagactatgacaaacgagtcgagataagactggaacacgctgttcatcaaatacatgaacgctgctggggcattggtcagcccaaaagttatcaccaagaactcataatgaccatatcgggtccttaaagctgtcttaagaataaccgagtccttgatcttcaactggtgataacttgaacggagatcaatcttggagaacactctcgctccctgaagctggtcgaataaatcatcaatgcgaggcaaatgatacttgttcttaattgttaccttgttcaattgcctataatcaatgcacatcctcatagtgccatccttcttctttacaaatagaactggtgcaccccaaggtgacacactatgccgaatgaaccctttatcaaggagttcctgaagctgctcctttaattccttcatctctgctggtgccatacgatacggtgaaactgaaatgggctgagtgctcggcaccaggtcaataccaaaatcaatatccctgtttggtggcatgcccgataggtctacaggaaacacatcaagaaaatccctcacaactggaacagaataaacactaggagtctcagcactgacatcctttacaaatgctagatacgaaagacaacccttaccaaccatacgctgggctttcaagaatgagataactctactggaaaattagtcacacctcgccactcgatccgtggcacacccggtatagccaatgtgattgtcttagcatgatagtctagaatagcacgacacggagatagctaatccatgcctaaaatgacattgaaatccaccatacttaacaataatagatccactcgggcctccagacccccaatagtcaccacacacgattggtacatacagtctacaacaacagtatcacccaccggagtagatacatgtacccaaataacgagcaaagtatgatgacacataagaaatggtggaaccaggatcaaataatacagaggaatatttgtggcagattgaaacaatacctgtaataaccgcatctgaagcaataacatcgggtctgcccgaaagtgcatagaaacgggcctgaccgccacctgatcaacctccctctctggggtgacccctagctggctgggcggatggtggtgaagtaactggtgctgaagccgataactgattcacccgcatgcctcaaactggaactaacatagcacataaccgtgcaatcgactaattaatagtggactcccccacttggctcgaagccatagaccaaaacatatacaataactcataacgcatatactttattggtgccataataccatattgagattaaactcaatcctttataagctcgtggaacacagaccatcttgtagtttatatcttctgcaaatctcgcattcactctcgtagtagtaaagcctactctcttgagcaacccaaattcaaattgtaaaacatatatttccctggtaacaaatgacacaagggattacacaaacttcagaataatccgcaggagataaccctacctgctttgcctcaaacaaacatttctgtataccttccaccatcataaacattacgcagttacttaaacttcttgagtctgaactcagaccacaacatgaaatttactccactcccaactaggaaacatagaaagattcttcacacacccataactcggggctatacctcaaatcaagataaaaatcgagcacctaatagtccttctatcctccagcaaacccttctcgttgcttccaaatcacatgaatacatctcgcagtcacatcacattcatcacgtaactatccagtcatcacctcccttaatagggacataacagaacatatggatccagaaactgcgctcatgaaatcaacagctcagggctcaagctataggcaaaaatccggcctcgagtcctccaaactggcccaacatcaatgcacagagatcacatctcacccctagattgaggaatcacaagccatcaatgcacatctgataccgagcgctcatgcgcacatacgaacgtgtggaaagaattcaaagagttacttttcaagctgaatcaaggacgcacgagaagaattcaagaatgtgaagtttttcctaaaggttctgcagcctctcaaggataaatacagacatctccgtaccgatacacgagactctactaaacctgcttataactcgtgagacctatataacctaggctctgataccaacttgtcacgactccaaacccgaacccagtcgtgatggcacctctcatgaagacaaggccagccgacacttcccattatccgattattaataattaagcatttaagataccatctaaacatgaagaaataaaccaaagtttaagcaattaatagaataatatgcggaatacagcccaaacacaacaattaatagcatactgataccggagtgttagtagtcatgagcatctaaacaattcggaatactacaaatcaaactacagagtttaatatagaaactaagaaaatgaagaagtaaaatagggaagagctccgggctgcgaacgccaatagctacctagagactccttagatccgcctgagccggaacggtcaacactaaggagcaggaccagatacgcttgtttctgcacacagggtgcaaggagtaaagtgagtactccaactcagtgagtaataatcataaataaagactgaaagcaggaaatcatgcaaggcacaaaagcatgctataatgaagcagtgaaaacactttttaaaacagtaaaccagtgaaagataggtgaaaatcctttaactcaaatttacttccttaaaagcctttttcaacaattaagtaggtaattgacagtcaattatgaaaaataaacacataaaggtttgccccccaggcacaatatcaacaaatccgcccctcgggcaacatctcagaatagtacctgcccctcgggcattatcttagaacaataccagcccctcaggctcaatctcgtatcacaatgggtactcgttctcactggggatgtatagactcttggaggggccccttacggcccaagcgcaatatcaagccacctcgtggcatcatcactacatcctcggccttatatcaatcaagccacctcgcggcgtacatacctcaggccctaggcctcataatcagtatcaaatgtttcctcaaaacataggccctcggccttactcagtcaaaaatcctgacaagccactcgcgcaatagtaaaatagtgtttctcagcccaaacatcatttaaagtatcatttaagtattaaaactgagtaaaacatggctgagtatgaaaacaatggaaaataacatgattgagttcaagtataaagttaaaacagtgaggaaatatcaataaaaatccctgaagggttcaaatagttggcattcagcccaaataattatgatatcaaatagatttcagtcaaatacgcggtaaaatcatcagtcgggatggaccaagtcacaatccccattagtgctcgacctcacgctcatcatcaaacgtgtgtctcacctcaatatagaaccacgatgtgcaaatccggggtttcaaaccctcagaacatcatttacaatcattactcacctcgaaccggtcaaatctctagctcgtgatgccttttcccctcgaatcggcctctaatcgcgtcggaactctccaaaatcagaacgaggatgtcaaaatatgctaaaggaatgaagcccaagcgaatataattaatttacaacataaatcccgtaattaccaaaacccaacccccgggcccacgtcttggaattcaataatttttatatcaatagatttcttatctccccacgagttcatacatatcaaaagttctgaaatccaacctcaaatggtctttcaaatcctcaatcaaaggtctaaatagtgaagccctagttctttatttttggcttaatttccatgatttactatgtggaattcacattagaatcgagttttaagtccaagaatcttacctccaagtgattctccttgaatccctcttcaatccccttcaaaaagctccaaaaatgaccaacaatggaagaaataaaccccacattcacggataagacgaccttttaaaccttctgcccaggcctaatttccttcatcgcgatcgcaggacatccttcgcgatcgcgaagcacaaatcctcagctcccggatttaaccctatgcgaatgcgtaatatcccatgcgaacgcgatgatcaagctcccaacactatgcgatcgcggactggctaccgtattcgcaatgaacaacttcaagacaagacccctggtccacttaactctacgcgaacacgacccactccccgcgttcgcgatcaacaatgcctttaccctatgcgatcacatccccatcttcgcgaaggcactgagtaaactgtactgtccccacaatagctctacgcgatcgcgagactccctacgcgatcgcgaagagtaaaagctctacaacaacttaaccaaaatctgcaacctctccaaggcaagaaatggtccgattgaccatccgaaactcacctgaggcccccgggacctcaatcaaaggcacaaacatatcacaaaaccttattcaaaattgtaccaatcttcaaaacacctcaaaacacatcaaatcaacaaaaacacatcggattcaagcctaagtttctaaaatcttccgaatttcgcttttgataaaaaacccaaccaaaacacgtacaaatgaactgaaatttttcacacacatcccaaatgacacaacaaaaatagtgcaactctcggaattccattccgacccctatatcaaaatctcgcctactaaccggaaatcaccaaaatatcaacttcgccaatcaagcctaaatctactccaaacctccaaaacgcattccgatcacgttcctaagtcccaaatcacctcccgaagctatctaaaccatcgaaattcacatacaagccctctaacatataagtcaacatccggttaacttttccaacttaagcttcctcaaaagagactaagtgtctcaaacctttccaaaatcatttcggattcgattcaaccaacctgataccacataacacagatacacaaagcataaagaagcataaatggtggaaatggagcggtaacgcatgagacgactggccgagtcatcatatatatatacagatttatcctattgtaaaataacaaataaagaatattcctatacacttgcactactcctatttgtctgttgtgcaacagaaaactaaaaaatattctttcccatatgctcatgcgagaagcacatgagtttgacttcttggaagcttatgtacaactgtttaaatattaatcagatggttgagaataaaagattatgagtacgctccatgattcttccacgtgtagggatgagctataattgataaaagacttaggcacttcaacacaatatagagaagtctgaaaagctaagtgtttgtctgagatgtttcttcttcttccttctcttttctgtgtgaagatggttgtgaaaatggcttctcttcatcatcccccctcaagctggagggtagagacaaaaaccccagcttgctcatgatgttggtgtgagaaaccctagataagggtttggtaaagagatctgcaatttgggatttttaaggaacgaatgaaagggatatcaatccagcgagaaattgctatcgaacgaaatggcaatccaactctacatgtttagttcgttcgtggaagatgggattgcgggcgatatgaatcgccgccagactgtcagagtgtaaaggaaccggcaaagttggaggagtagataaatcagcaaggagtcgaacaagccaagtgatcttagcagtcacccatctcatggatcgatactcaaattcagcggatgacaaggagatggagatttgcttcttcgatttccaagaaataggggcacctccaagagtaataaaaaaaccactgacggagtgacgagaatctttacaagcagcccagtcagcatcacaaaaagcgacaagatcaaaagagggagcagaagagagaaggataccttggcctgggtctgatcaaagatatcagaacactctgagaccagtagaaaaatgtgaaagagaaggcctttgcataaattgactaaggcaaagaaaagaaaacaaatatctggccgagtattggtgagatagttaagttcacctaccgatcatcgataaagagtgggatcctccattggtggttctaattcagcgtgcaatttggagtatggatcaagaagagatgagacggtaggccctttacaatcaaactcaaccaatagttccaaggtaaatttttgttgactgactatgtacccttgttgttctctgagtatttccatgcctaagaaatagtatgtatgtcccaagttcttgactttgaattcagaattcaaaaattgagtcataagttgtatttatgtggcatcatttcctgtgatgagaatattgtcaacatatactactatgatggatatcctcttatttgtgtgtttgtagaataaggaatagtcattcagggaaatagaatagctgtagacatgtgatttttgaccctccccaagattttacacatttttgtatttaaatatttagtttaggtctaatatagttattttaactagttttgacccttttactttatttttatcacaaaataaaaattacaaaaaatatttcttgtttttagttgcttttagtttatatacctttcgtaaaaattaagaaaaatacaaaaatagtaccttattattattttaatatgatatttgaaaacaccaaaaaataagtttgttttaattgttagtcttattttaatagttatttttacttaagtaggatcaattagtaaatgagatcgtgtttttagtctcgtttgcggaaagaataaaatttgggataacgacccattttaggcctaattttcggacctagcccataattttcaagcccataccccctaacctaatataaccctaaaagacctaaagtgatgagattttatatatagagcctaggaccctaagagccaaaaaagacaacagaaaaatgaaaaaaggacctaaggaaaatctgaaatgaggaacaaaaacctagatcccaaaaatcacatcagatccgccgctgacacccacgagcccccccacgtttcttcttcaaacccttccaccccagccgctagatccatcaacatacaccatcagcaacaccaagccaaagaccagcaccgttcaaccccaaacgactttgcctttcatcttcttaagtgctaaagcatgaatagcccacacccctccatcttgaacccaaaaatggtggatccctaatagctagcagcggccaggcttcttcatacaaaaaaagctacagcgcctcatcttcctcttcttaaaaagcattgttacagtcgcagaatttcggtgttcgacagaggtagtggcattttcagccaccaaaatagatttagattctcctccaacccccgttgcaactagccatagaaccagctccaaatatacgaaaatagtagctcaaaccagtcatcttcaagtaccaaaacagctccacccgttttgtttttttaaaactttggtcgtatagttactgttatttatcaacaaacgaaacactatccatttatgttttttcagaagatttcgtaagtgttatggggtatttgagattgaaatgaactctaatttcaaaacgtgagaactgaaaaggctgaaagactattattttggttgcttgattctggcgtgaacaatgattaaagcatgggtttgaatccgtgtttagttgagtttttgttgctaattcgggttttgtccatggttcgtcacatttttgagcgttaaacattgaaacaaacaattccccggctatattgaggtccaattcttttatactctattcgttttaatcaagcttaatgttaataatttggttggtgatgcgattccgttgtttccgtaattattttttgtggttctgaattttcttgctcggttatctgctcgtgtttactcgaattggttatatctaaacatgattttgtcatagtatagaattgagtcgctatccatcaactgaactacgccaactagattaaaagggctcgagtgtgcatttcatgtgaccctgccataattttgataataataatggaataaatatgttataaatccgggtgtacatttcatgtgacctgattctcctttccaataaggttaaatagaacgtgtcgtgaaccacaattgcatttcatatagcagggattacgatgcgttttaaataaccttgaaatttcctaaaatattaaaagggctaaaaagttaaaaatgcacagtaggttttaaaacgtgtaaaagatcagataaataggccaataataatagttgagcgaccgtgctagaaccacggaattgggaaatgcctaacaccttctcccaggagaacagaattctatacccggatttttgtgtttgcggactataaaacagagtcaatttcctcgattcagaattctaaaccggtgacttgggacaccattaattatcccaagtggcgactctgatcttaaataaataataccgtttcgattgttatttaaatttaaaaaatctcccttatatcccttttgggggtggtaaaaaggaggtgtgacagctctagcgactctgctagggacctgctaaacgagcataccattgccttgaggcatgttttagtccatagagtgatttcttcaataaacacacctgattaggatgagagggagtgagacaagctggaaatttcatatacacctcttcctatagatctccatgtagaaatgcattgttaatatccagttgtgagtcttcccaccctttattcacagctacagtcaataagcatctgatagtggtcatctcgaccactggactaaaagtctcagaataatcaatgccttccctttgtatgtccccccgacaaccaacctggctttcaaccttttaattgacccatctgattcgtgcttaaccttgtaaacccatttacaaggcaattctttcttgcctgggggtaaagaaacaacattccaggtgttgttgagttgaagagcttgaattttagcttccattatttttctccatccaagatcttgggaagcttgtgtatagctggtaggctcaaaaactgtggagatagatttgaaaatagtctgattgttgagagaaaggtctccaaaagaaaaaatattagtgtgatgacccgactagtcgtctcatgtattatcgggctggttggctcgggttcaaaaaaattttggcgaggtttgaggcacttagtctcttttgagtgagtttaagttggaaaagtcaactgaatgttgacgtatgtgaaatagggctcgtatatgaattctgatagttcggatagcttcgagggggtgatttgagacttaggagtgtgatcggaatatgttttggaggtccggaatagatttaggcttgaatttgcgaaattgaaactttggcgttttccggttgataggtgaaattttgatgtaggggtcagaatggaattctgagagttgtagtaggtccgttgtgtcatttgggatgtatgtgcaaaagtttaggtcattcggacgtggtttgatagatttttggatcaaaagcaaaactcgaaatattttagaatcttaggcttgatttcaatgtgatttggctgattcgatgttgtttgaggtgttttgaagattgttacaagtttgagtggtggtatatggcttgttggtgcttttggttgaggtcccgggggcctcagggtgatttcggagggttgacgaagagtttgattttttggtgaagttgcagaatttttctgcttctgttgtttccgcacctgtggattggggaccgcaggtgcgatgccgtagatgcgttcaaggatgcgaggggtgggagctgcatatgcggtatgttgagcgcaccggcgatggcgcatgtgttgttatttgatcgcagatgcgactttggacatttaagtggaaaactataggtgcgatgtcttggaccacaaaagcagtaccgcagatgcggtggatggaccgcaggtgcagaacccctaggtcagaaagtatataatgtttccttcgtgaagttttgctaagttctccatttttgaagacgggaaatgggctaaggcagtggatttcaagggaaaattgaggaatatcagtttggtaagttccctaagcttcattacttgagtttatgatcatttttccattgtttaatcatggtgttagtggaaattaaggaagaaaattgaggtattagggcttggtattgaagacctttgagtgaggatttgaggggtcatttgtgactggattttgggacttttgatatgtatgaactcatggagtgataaggattctgttgatgcaaattttatcatattttgagacgtgggcccgggggtcgggttttggtcaatttcagaatttttggtataatttgattattctcgcttgggcttcaatcccttagcatattctaatgttatgattctgattttgggtagattcagtgcgagttgaggccgaggcgagaggcaaaggcattgtggagtagtaattcatccggttagaggtaagtaaccattgtaaatctggaactgagggtacaaaccccggtatttcgaaatgttttgataaatgaggtgacacacatgctaggtgacgagcgtgtgggcatgcactggtagagattgtgacttggtctgccccgtagcgactattaagctgcgtacttgatttgaaatcttataaaatctcatattttagacatttatattgtattatgggttgtatgccatgtttgggccttgtgccgacctgttgaaacccttaggggcatttttactgttttcctcactctatttatttgaaagcatatcctcagtcatgttttacctgtttattatttaaaactggttttatcattctacttcttaaaatgtgagaactcttcgaactgagtttccctgatttctactgttatgcccgagtggttgtgaggttaatgactgacagaggttgaggacctaatggtgaggattataaatattacggatcgggctacacaccgcaacaatattatatgtatatattatggatcgggctgcatgctgcaacaatatatatatgttggatcgggctgcgcgccgcagcgatatgacgcttgggctgtaggagttcctccagagtctgtacacccccagtaagcatagtcgtctataaactatggatcgggctgcacgtcgcagcaattattatgattattactattatgaggtgtatttgagcctgagtgctgagtgtgagtactgagtgatgagagctgagtcatgggtgaccaagaggtttgcccgagaggctatatttttgagtgatactttgcccgaggggcccatttatgatacttttgctgatttcactcttcttttaaaataagccctgctgaaattttttaaatgatttcaaagtatttcaattgaaactgaagttttatgaagaaactggtctaaaaccgttgagtttgatttgttattctgttgtttactcttctatatgattttataactgctcgtcactgctttcagaccttatttactttagttacttattgagttggcgtactgacgttactccctgcaccttgtgtgcagatctaggtgcccgagcggcagagtgagggtcctcagcattgtcagagtttgccagagactgcaaggtagatgcatggaatccgcagccctgctttcttccttcctatccttgtttttctgtattttagacttgttatgtattagatagtcggatttatatatttagaggctctagacttgtgactccagatgtttaggctatgttggtttaatgttttactaaattccacacattttagctgttttatacatttcttatgagaatttgagatttaaatcaatgttaggaaatggtttttataaaagaaattattgtggttgatggtttgggttggattgcctagtattgtgataggcaccatcacgaccgagcatttagggtcgtgacaattagggtgagaaatatgataaaaacaggaggaggtaagattagagaaaacaatgctattgcagacatatttattgagataggtaggtttctgggaaatcctctcagattttctaagaggaggtggtggtattgggattgtaggctgtgaaatagagtaatcagtatgagatggattatgaaaaggagaatctggggagctggtaatagatacaggatttccaggattattgagagaaataagggtgctattctcagaagtatttggatatagagggacatgtgagtgtgactaatgattgatggttgagttgggagataggaaatcttgagaagtagtttcagtagtggtagatgggtgagggaagaaaagataagggggaaaggagagaatgaggttggagcagcagaaacaaaagaaaaattgcttcatggaacttaacatctcttgaggtaaagaccttcttagaatgtaactctagcaatttatatcctttctgatgttgtgcatatcccagaaaaataaaagcgtgtgccatgggatcaaatttgcttctgttttgtgttagagtagaggcacaagataagcatccaaaggacttgagttgttcattctgtggactccttttaaacaaaatctcaaaaggtgtttttccttttagaactctagaaggaaacctattgattagatatgtaacagtcaaaatacactctccctagtattggataggaacatgtgactgaaaataaaatcctcttgcaacttccaaaaggtgcctatgctttcttttaactaccatattctgctggggacttgctacacatgaagtctcatgtaagatgccttgagactaaagaaaatcagactgaaaagatcccttccccattttattgcattatcagatctaattcttttaactttccttgcaaattgtctctctaccataactaagaaagattgtaagatagtgaaatcattacttttggaacttaaaaggaaagtccaagttcccctactaaaattatcaaccacattcaagagatatttatatccattgtaagtagtacttttgaatggtcctcatacatcaatacgaataagataaaaaattccatgagttctgatttgactcaagggaaaaggtaatctagtttgtctagcttttggacaaatatcacacacaaaattgaaattggaaggaaaataaatgaattgaagatttttcattactaaaaatggcagatgccccaatctaaaaatgccattggagtacattggagacctctatattggaattagaaacagaacaagaaacttcactaggaactagaatggaatcacttccttgtggaattgaaaatatattggtatttaaactaaaaccagaatctattttaggtgtactaggttccagcaggtacaattctcctcttaattcatcaaaaacttgtccctcttcattaaagggacctgcatgatgcatccactagaaattagattgagtgagcaataaaactggacacacaacttatggactgggagtaaattatatttgaaagaaggaacataaagaaccctttcaagaatcatattagactgaataggaacactacctatgtgtttgacatataattgaaataagttaggtaggctaatatatacaggaataggaagtggatctaaagttaagaaacaatttgaatcaaaacacatgtgttcagaagcccctaaatcaatgatccaggtttttgtgttaatagctgccaaccaagttttagtatatttaagtattgtatcagccactgcatttgcattgattgtagttcctaatgttgctatatttccaagttgtgcctgcttgattaggttcatcagctcagacatatgttccttactgaaaaactgagtttaaggtgttccatcattgctttgagtgcttccattgtcattgtcttgtcctttaactatagcattagccttgacctgtgttgatatggtgaattggaaatcatctggaaacccatttagcctataacaatctaccctgacatgcccaattctcatgcaatatgtatagttcatattaggattaaattttgctttccttcccttaggtttctgctgtgtgttattaaccttttgtgaattagtccatgacttttgttgtgactgattgttgtttttctgtggagccttaccttgaactcctaccatgaatgaggaagcatcagcattgaactgtgatcttgcatatatctccctttgatttttatcttgtagaagaagtgaataagaaaaatctattctagacaatggattcatcataaggatgtttcctcttgcctgggaatagacatcatttagtcccattaaaaactgaatgatcctttggtcttctaaaaactttgtgacttttctttttccatcacaaactcagttactagagtagactagatgagagttgagggagtcaagttcatcccataatttcttaagtatggtaaagtatccaataatactgttgttaccttgaactaacactgatattttcttttgcagttggtacagcttggctctattagtttgcccaaatctgtgttcaaggatattccacaaatcttttgtagattatgaatagatgatactgccacctatctctttggataaagagttcagaagccaagatgtcaccatgaagttgcatctgctccattgaaggtgatctcgtacatcaggttttggtttcccacacaccatttatgaagcctatcttgtttttggattaaagtgctacaaaaattaatctcctccgtccctcaaagcctctatcatcaaatagtgtggtaacaagactcaaaccaggagaattagacgagtaaaggaaataaggatgattcacatcctgtgaatggttgaaccagagataatgggagtaaaaagagtcggaggaacttcttctcctgccatagttgaatactatattctgagaaaaaaggaaatttggatcgatctactactgctctgataccatgaaagaaaataggaaagaattgtgaaatttctctgccttgtattgataatgtaaatccctaattatatagatttatcctacagtaaaataaaaaataaagaatattcctatacacttgtactactcttatttgtctactatgtaacagaaaactaaaaaatattctttcccatgtgctcaagcgagaaacacatgagtttggcttcttggaagcttccttaagtacaactatttaaatattgatcagatggttgagaataaaagatcatgaccctccataattcttccacgggtaaggctgagctacaattgataaaacacttgggcacttcaacacaatatagagaagtccgaaaagctaagtgtctgtctgaaatatttcttcttcgtccttctcttttctgtgtgaagatggctgtgaaaatggcttctcttcatcaccccttctcgtaagaaagaaatccctactattgtgctttcctagctccttcaattatttatcaataaataatggaaaattaaatatttttctttgtgagcataactccacttaacttatttacagattttttttagaaaataaaatacttgaataagttactaatttaatcaaggattggagttatatttttttgtcagattattctgtagaaggacaattatacataataatctcaaatgaatcaattttcatgaaaaatggtgagttgaaaaacgtctcgaaacttgctactgtttcaaagttcaaagtgcttattagtataaatttttgccgtagagtatttaattatgcattgttattagtgagtcactatttcttgtacaaaatacatacacttttctttttatttaaaatcatgtatacttcgactgagtttattttgtttttcaccaagttatcataaataattacacaatttctttttggatcgaaattgtgatgatccgaaaggtcatcacttattttagaaataaatcctgtattccaaggccttaaaatcttcttttctacttcacctaaatttgcgtgcgtggtctggacgtatatccagaaagcttttatgggaaaatatgagaaatagaaatttctagagttaaaatttaattatggttgactttggtcaatattttgagcaaacggacccggatctgtgttccgacgatcccggaaggtctgcagtaaaatatgatacttgggcatatgcccggaaatgaaccccgaggtcccaagccttagaaattaatttttgaaagaaattattttgctgagttatttatgaaataaaaaaagaattaatgtttaaaatcaatagtatcgggcctgttttttggttctggagtccggtacaaactcgttaaagtatttaaatggtaactgtgaaatttgatgaaaaatggagtttatttgacgtgatttggacctccgattgaagagttatgaactttaagtgtttttgatgaaaatgatgagttttgaggtttaattcatagttttacatgttattttcatgatttgattacacgagtaagcccgtatgatatttttaggttggtgtgcatgtttggtttggagccccgagggctcgggtgagtttcggataggccacagagtgacatttggacttgggaagttggaggttttagctggtatgttgcaggtctgcaggctttgcattcgcgaaacttggctcgcaaatgcgagattgcaaatgcgaataacccatcgcaaacgaattgtggaagtaaaattagaaattgaaccttatagagcattggctcaagttttatagtgagttgtgaagtaaacgtgaaaaaaagaagaggattattatttgtctcccttgccgggatgttgttgcttttaatgctatctcccttgccggaatgttgttgcttttaattctatctcccttgccgtgatgttgatattcttgatattgttcccttcctggatattattgttgtactattgttcccttgccgggattttattatgatttcatttatttccttgtccttatttcttgtgatttttgattgggtgaggaagagtgttaaaacacgaagggtgatgttgtgcattgttttggtgagagagtgttaaagcacgaagggtgatgccgtgtttgattattgtgaggaagagtgtaaaatcacgaagggtgatgtcgtgctgtacgatgtacaattttgtgccaattatattgattttatggtgagtacgagagtaaaagcatgaaggatgatgccgtgcagattatattgactcttatggttaggacgagagtaaaagcacaaagggtgatgccgtgcacttgtttgatttctgattcttgttgataattgagttatggtgttccttgtaattacttgctatccttctagtatcatttcatatttccccgcaacatgttcccccctcccattcttaactgtacactcctgctgttattttccactgtatatgatttaactgcacaggtttatttggtagtctggtcctagcctcatcactacttcgccgaggttaggataggcacttaccagcacatggggtcggttgtgctgatactacactctgcattatatgcagatcccgacgcagtagcttttggaccttagctttggggttgctgccttcagtccatacggagatccaaggtagtcctgtgggcgtccgcaggccctgacatctccatctatcctttcgtcctgtttcatttacgtatttcagaaacaattttgtatttatttttcagaccttgtttgtagtattcctagaccgtttgtgaagttgtgacaccagttttgggtagtccttgtttaagaaattgtattggaaatatttaaatagttttatttgtttttcttccgcttgtttaaattccgttgtttataaactgttggttcatcattattaaaggattaaaaatgggaaaaaggtaaattgctcaatggttggcttgcctagctttcagcagtaggctctatcgcgactcccgagggtgggaaatccgggtcatgacaagttggtatcagagctctaggttacatatgtctcacaactcacggacaagcttagtagagtctgagggatcggtacggagacgtctgtatgtatcccagcagctacagagttaggaaaaacttcacaatttcctgttgcacgctttggtttctcaatgctaattgaatttctactctgttcttttgtagatggcgagaacacgcgcttcctcatccactgatcagcaaccgagcccctagcagcagctcccacgaggttcgtagggcaagtccgaggccgtgctagacgccgtagtaggggcagagcttagcccaaagtagtagcaccagcggcggagcctcaggttgagtttgatgatgaggttccggcctaggtagttccggtgggcccagatcaggtcccagatgggttcattactacaccagtgctctaggatgctctagtccgtctggtgggccttatggagaggcttgcttcctgtagcaccagccatctctcgagctagaggaggagcccagaatcctgctactcgcactccggagtagatggctccctagtttcagactccaacagctcagccagttggagaagttcagccgggcatggtagctcagactggtgatggagcagctatgtctgccgatgcattgtggaaattggacaggttcaccaagctctttactaccattttcagcagtgcatcttctgaggatcccctggattatttagatagctgtcatgaggttctcaagaacatgggatagtggagaccaatggggtcgactttgctacttttcgcttgtctagatccgccaagacttggtggagagattattgtttggctagaccagacgggtcaccagctttgacttgggagcagttttctcagctatttctggagaagtttctccctatcactcagagagagatccatcagaggcagtttgagcatctctagcagggttttatgactgttactcagtacgagaccaggtttattgatttggcccatcatgctttacttatacttcccactaagagagagagagtgatgaggttcattgagggactcattcaacctattcgactttagatgtctaaggagacggagagtgagatttctttttaggaggcggccaatgtggacaggagagttgagatagttctatcacagggaggtggtcaggggtctgacaagaggcctcgtcatttaggcagatttagtggggcctcatctggaggcagggatttgtacggtagatgccatcatcctaggcctttttagtcaacacttcaggtttctcacagtttttcaggtggccgtgattctcatatgcagtattcggatcaacagtactatagtgcaccgcaagctcctatcagtgcctcgccgctccagagtttcgaggtggtcattcaggtcgtcagggtcagtagtctcagcagccgagggcttgttatacttatggtcatatgggtcacattgctatattttgccctcaagcattgagtagctctcagcatcagggttctcgtgccatggttcaggcattgagtgttccacagctcgctcagccatctagaggtggaggtagaggtgctagaggtggatgtagaggtattagaggtggaggtcaagccgctagaggtggaggccagctagcagcaggctgtcccagatatgtagttcaaggtggtaaggcctagccccgatgttatgctcttctagtgaggcctgaggctaaggcttccgatgcagttatcacaggtacggttctggtttgtagtagagatgctttagttctatttgatccaagatctacgtactcttattttgcaccatatctggtcatgcctagtgattctttaagtgctcctgtatatgtgtctacactggtaggtgattatattatggtagatcgtgttcatcattcgtgtatagttgtgattgggggtcttgagactcatgtagatttgttacgtctgaacgatgtcatattggggatggacatgttatccccttaccacgctatcttgggctatcatgccaagactgtaaccttagccttgacgggcttgcctcatttacagtgaagagggactcctggtcattctacccgtagtgttatctcatatatgaaggatcgacgtatggttgagaaggtgtgtttggcttatttggcatatgttcatgattctagtgccgaggttccttctattgattttgtgcctattgttcgtgagtttcctgaggtatatcctccagacctgccgggtatgccacccgacaaggatattgacttctgtattgatttggctctaggcactcaacccatttctatcccgccgtatcgtatggccctgcctgagttgaatgagttgaaggagcagttgcaagacttgctcgaaaaaggcttcattagacctagtgtctcaccttggggtgcgccgatgttatttgttaaaaagaaggatggatcaatgatgatgtgtatagattaccgacagttgaacaaggtcacaatcaagaataagtatccattgccaaggattgatgatttgtttgatcagcttcagggtgccaaggtattttcgaagattgacttgagatctggctaccatcagttgaggattagggcatctgacgtccctaatacagctttccgcacttggcacaagcattatgagttcttggtgatgccatttgggttgacaaatgccccaacagcttttatggatttgatgaaccgagtgttcagtccttagttggattcatttgtgatagtcttcattgatgatattttgatctattctcccacccgggaggagcatgagcagctgagagtggtcctccagactttgagagatagtcagttgtatgctaagttttcaaagtgtgagttctagttaagttcagttgcattcttgggtcatgttgtattagcaaagggtattcaggtagatcctaagaagatagaggtagtcaagaactggcctagaccagcatcaactacaaagatctagaatttcttgggtttgggaggctattatcatcagttcgtggaggggttttcgtctattgcagccctgatgaccaggttgacccagaagggtgcccaatttaggtggtcggccgagtgtgaggcgagctttcagaagttcaagacagctttgactacgacgctagtgttgtttttgcccacaggttcagggacataaacagtttattgtgatgcatctcgtattggacttggtgcggtgttgatgtaggatgtcaaggttattgcatatgcttcacatcagttgaagattcatgagaagaactatctggttcatgatttggatttagcatccattattcacacgttgaagatttggaggcattatctatatggcatgtcatgtgaggtgttcacgaatcacaagagtttgcaatacttgttcaagcataaggagctaaacttgaggcagagaaggtggtttaagctattgaaggactatgatatcaccatcttataccatctgggaaaggccaatgtggtgcccgatgctttgagtaggaagtcagctagtatgggcagtcttgcgtatattcaggtcggtgagtgaccactttctttggatgttcaggctttggccaatcagttcatgaggttggaccgtgtgttagattgcacagtcgctcattcttcttttttgaagcgtatccgagatcggcagtatgatgatcctcatttgtgtgtccttagagacacggtgcaatacggaggtgccaagcaaagtacattaggagattatggagttttgaggctacagggtcgagtttgtgtgcctaatgtggatgggcttcaggagttgattttagagaaggcccatagttcccggtactctattcacccgggtaccgctaagatgtttcaggatttgcggcagcattattggtggaggagaatgaagaaggacattgttgcatagatggcccgatgtttgaattgtcaatagtttaagtacaagcatcagaggcctggtggtttgttccagaagattgagattcctgagtggaagtgggagcatatcactatggacatcgttgttggactcccacggacttagaggatgttcgatgtagtgtgggttattgttgataggttgaccaagtcagcacatatcattccggtggcagtctcctattcttctaagaggttagctgagatctatacccgagagattgttcattttcatggtgtgcccatgtctatcatttcggatagaggtacatagtttacatcacatttctggagagcagttcagcgggagttgggaacacgggttgagttaagaacaacatttcatcctcaaatagacgggtagtccgagcgcattattcagattttggaggatatgctccgagcttgtgtcattgactttggaggctcgtgcgatcagtttttgcctctagtggagtttgcctacaacaacaactaccagtcgagtatctagatggctctttatgaggctttatatggtaggtggtgtcagtcgccggttggatggtttgagccgagagaggctcggttgttgggtacgcatctattacaggatgccttggacaaggttaggatcattcagtataggcttcgtaatactcagtccaggaaaaagagttatgccgaccataaggttcgtgatttggcgttcatggtgggtgagcgggtgttgcttcggaagtctcctatgaagggcgtgatgatagttagaaagatggacaagcttagccctaggttcattagcccgtttgagattcttgatcgagtgggagaggtggcttacagacttgcgttgctgccgagcttatcaatcgtgaatctagtatttcatgtgtccatgctttgaaagtatcacggtgatccatcacacgtgttagatttcagcactgtccagttggacaaagacttctcctatgagaaggagctagtagctattctagactggcaggtttgttagttgagatcgaagagtttcccttttgttcgtgttcagtggagaggtcagcttgctgaggcatcgacctgggagtccgagtccaatatgcggagctgttatccccatcttttccccgacttaggtacttccttcttatgtccgttcgaggacgaatgtttgttttagaggtggaggatgtgatgacccaaaaggtcatcacttattttagaaacaaatcctatattctgaggccttaaaacctcctttttaccttacctcaatttgcgtgcgtggtccggacgtatatctggaaagcttttatgtgaaaatatgagaaataaaaatttctagagttaaaatttgattttggttgactttggtcaacattttgagcaaacagactcggatctatatgccgacaatcctaggaggtccgcaataaaatatgagacttgggcgtatgctagaaatgaattccggggtcccaagccttagaaatcaatttttgaaagaaattgttttgctgaattatttatgaaataaagaaaagaattaatgtttaaaatcattggcattgggcccgtattttggttccagatcccggtacaaacttgttaaaatatttaaatggtaactataaaatttggtaaaaaatagagtttatttgacgtgatttggacctccggttgaagagttatgaactttaagtgttcttgatgaaaatgatgagttttgaggtttaattcatagttttacatgttattttcatgatttgattgcacgagcaagtccgtataatgtttttatgttggtgtgcatgtttggtttggagtctcgagggcttgggtgagtttcggatatgccacatagtgaaatttggatttgagaagttgcaggtttttagctagcatgttgcaggtctgcaggctccgcatttgtgaagcctggcttgcaaatgcgagatcgcaaatgcgaataacccatcgcaaatgcgagagaaggcctgggcagggctgatcgcaaatgcgatcatttcttcgcaaatgcgaagaggcctagaaatcccgatggtcgcaaatgcgacttccccatcgcaaatgcgatttcgcaattgcgaacaatggtcgcaaatgcgagtgtagcaagtccttaagggttctcaattgcgaacccttgtcgcaattgcgacatctgcgacctgcaaattcattacttagacgcatttcaaccatttttcaaaccctttcaaaacataaactctcttgggcgatttttcaaagacaaatactcttgcaaatcgattgtaagtcatttataacttgttttattattctttaacatcttttctcatgatttcaactcaaaatcaagggttttcatgggggaaattggatatttttggtaaaacctaggtttttcaaattttggggatttggacctcgatttgaggtccgatttcaaaacaaattgtatatttgggttcgtgggggattggttaatcgagttttggttcgaacctcgtattttgaccatgtggtctcggaggcgatttttgactttttgggaaaaactttagaaaacctattttcatgtattggaattgattcatttagcatttatggatatagttaagtaacttgtggctagatacgagcgaattgacatcgaggtaagtgtttggtctaaccttagcttgagggattaggagttgtgtcctatttgctatgttctatttgttgagtacgacgtatagacatagtgacgagtatgtttaccgtgaaaatggtaataccaattaaatttgtaaatgggattctaaaaatacgtgatctattctcgagctagttgttagagcaaacaatgctaatatcatgaagtttaatgataaagtgcgagctaaaatgaggcagtaatcaaaccgaaggggtctgttgcccggatgcaggaccggccggagaggacctcggggtcgaggtttgagtcgggctcgagctatcggggatagccgggaatgggataacaattaaggatacgattaagcaaggctcttttcagccaatactgagctatatactgaagaataagtaagaggacgatatatattaaagtggcctcgggccagtgaggacgaacaagctagaaagaaaagagagagagagatattatcgcacttatggagaaatagagcaacatcagtcccttacaaggtagggtgagtcccctttatataggaggggggacttagctacaagtatgtggagattaattacaaagtatgtaaatgggatggcttgacgtgatgcctcaacataggctctggataggccggccctgtcagatttagctatgtgccttgggagcttccctctctgtactgacttcggtctccttttcctctaagtcaggcttcaacgagccctgatattgggaactcggttgtggcctctcgtcctcggggtcccgaggcatgcttccgaaatgactcaacagtgagaaataaagtcttctaattttgctgtgtatagattgtctccgcatttcctattatgaagtgatgggaaatgattttgacactcgactcctcgagcttctttcggcgatgccatatcgatgatgcgactctggtcgtgagctttgtggtaaccggacatccacgagctcgtgatttctgacctcattcattgtactcctaattctcacttcccaaggtgaaggtaccactgttggtttggttttccatggatgcattgactgcgcccgtcagtcaatcttccaaagcctagatgagcgtgttgtaaccccctataaatgggggtgccttggctttgcttttcctatcacagtgcctccgttggcttgcttgcctatttcttcttatcatcttctttcacccttgaacatcatgctaggggctcatgaccttaagtccttttggaggagtttccttagactgtgtcgtggccttttgcaggggcttcccttcgttgagcataaccatgttgtcccgctactactgtggccgttaacatattcactgtggctattgttgttggcccgagatgatgatggaaggggggtcaattttcccctcgtgtagacagtcattcggattatgcaccgctgctcaaaagggggctcggattaaacaccgtttctcaccttcataccctagctcgatgtggtgctccgctccgagttgggggcttgcatggctagacgttccaagaagtggattctaagtagtcgtgcaagcgggatcaaggtttgtttggtccgatgtcactccagagttcccttggccaaagagggtcctcgagtttcggagagctatgccattttttcatccctccccgccactcaccttgtcccttggggatatcagtgtggaaggttgggatgaaactttcgaggatgcacgtccggaggcacctgttgcggagttcaaaggtggaccagtctttcgggctttcacttggcgtgtgcatccctttgtctcttcttttaggcgcagagatcctccgtaggattttgtaattgtatgtaatgtccccttgagggttgttgtaaatggatcttttatgaaatggaatatactccagtgacgtttgctttagatctttactttgtttctgtatcatctcatgccctttgaggccctttgaatgccttcttttattcgttgactactgatatgtgacttgggcgcggacattccttccgatcctctactgatcgacatggctctctttcgaactcatcgtcgtacttcagaccaatcccagattgatttgataggcccgggctaccgaggcccttcgagctgtatggagataatgcgtcgaattttggagccttcgggaatgttatcctaaatgaaggtcagcttcaggtacccgagggtcccttttaatcttgatgtagatagccctcccttttttaaagcgtataggatagacttatgctgaggagtttcctgctgcctcagacctttgtggagctttcgagattggagcttcctacatttattcctctttttagaaagagggaatcacgagaccaggtacttgccctgcatcgagtgctggtgttacaaaacttcccgaagtccgacttctttgggtcagggatcctcgaggtaggatgttgtctcgagcttggagataatatggatggcccctcgggtcttgacttctcattgaaggattctatctagattgggtatcgatttgtcgatctgtatcgaggctgtcggctccccgggtctcgcatcgggtaggcgagtcgtcgctgcttctcgcatatatgtggggcggcttcggcttcttcgcaagacctcactatttttagatagacgatttcctgctttggcacagggtacttcatctctccaggcataaaaagtgctggtgcacgcccttgctttgaactattagttttaccatagtcatggaaaccacttcagggccgattcggcagggaacaggggggggggggttgctcccagcgctcaagaaccgaaggagtttgctttgaagacggcatccttgataagaggggaacacctggagatggtgaggaattactgcgggtggagcgagggggtaacactgcaggtgctttctccaaataagggtattacagactccactgatggagttttgagcgtatacctataccctttcgcatttggcccccctgctagggttgtgcttgatttttgcttgaagtatcgagttactctggcgcagatttatccatcgtttcggcgaatggtaatgataatgaggttcttcgtggagaaggttgggctcgaattcacgtttaatcacctcgttagactataccggccatttcattatcgaggcctgctaactctgaggtgccgtttgtccacgccctttgttgtcgatgatgaagaagacaaggaccgagagtgggccagttggtttattcaggctcaaactgctgacattatcccaacagggcttttgccatttcctgaagggtggaatcatgcacgtgagtggagtgtctggcgcttttttaaattttgcctatagcgaaaatcagttgagtaataatgttgtctaccttgttgcagcaacttcgtggatgccgggcaaagtccttgaccttcccgtctgggtccataagttggcgacccattcgacttgcgacgagcgcaggtggcgagctgtatttcgtaccaaatggggagtgaaataccaaggtatgtgcgtatgttgcctttgacttggccttcgtatattcgaggtaatattttcccctttcatttgtactggattcaccgtttgtagatacagggcggttgtttgggatgagacagtgttcttccgaagaggagaaagagtcgtcagcctccaagccgagggaggatggtgataagggggatcggcacccgcggtgtgatggagcttttagtggcattgggcgggctcagatctttgagtagagggcatcgtctgagcctgatgttcccggagtatcagattcccgggcggcgattcctccgagtgaatatgctctgcccgaggttggttctcctggggccggagaggcaggatcaacaggaatgtgttctggcttagaggaagtccatcggcttctcttcgaggtgagtttaggcgcgttttttcctgtatgtcacgccctcctccctttattgagttttccttgcataggcctgtgatgggcttatgtctaagctgctctgtcaaggggccaggctccagaaattcttgaacgatggcgagtcctttaggctccttagccaagagaatggggctaagttggcacgttggcgatatgaggcgtatcagagctcaaactatgagagttgtttgatagagcaggtaactttatatagtatgcgctttgctcctctctaaccttaaggctcaccccttttgttatatcagctgcaaaaaaaggcagaggccttggagtacctcaaaggcgacgtcaaccgcgtcagagttgtttgtggggagctaagggctcaagagcaagcttgagctttagaggagatatgtgcctcagccagggtccctgccatcgaggcccaactctgcttgactcgtgataacgccaaagttcaagcggacatgattgggaaactcgaatctgatctcttgaaggtcagagctgagataattaatgcccaggctaaagtggcgctaagccggaccaaggctgatcaggagatggcgattcatatgaaggatgttgctgatgcccaagctgagctaaagcgagccctcgaccgggagaagaggatcgaggagtatgttcgttgcagatctcggagagaggtactcgaggaggccagtgtacggggcttcgttctctcgaaagaattggctcgagcaagggtggatgagcgcgacgctctgtaacttcttgctgacgtcgcggagggagaatttgacaagttgtagccctttagtgcggagtgtagatttcgccattttgtcgctttgtttctgatatatgtagagcatgcttgtagatggagaatgcgcccttttcgcgcatataatatgtaggaagaaacttgaagctttattttttctgtacctcttttttgttattgcttttcgactgggcaggccggttttggtgtttggcgggatcctcgtaggtccggaactggtcggatagacctaggggctcttaagtgtaatcccttacgtgagctggtgctggggcctccatgcttggcccgactgttttaggcttagtctctgagtcgggcttcgtctcaagccttttgcccttgaatcttttatgcccgctcgggcaggcattaattatttttatttcttgctcttgggcatttgccgtttcgactattttggattcagtctccgagtcgtactgtgactcgagcttcaattgaccctcaagctctttcctgcctgcataggcggatgatgatggccttttgtgctccgggtcgaaatgaccttactggcacatggcccggagatttgctcggctggcgatagtggcatttatgtcgtgcccttaggcatattgtagtttaattattccgggtcaagcctccgagtcgcgttgtgacttgatcttttattgacccttaagtacctctggttttcagactgacgatagtgcctcttacgctatttcggtcgttgagacctttcaatatgtggctcggaggtttgcatagttaactattttggatccgatctctgaaccgggttacgatttgagctcattttaatcctcaagttgtcaaattttagctagtgacaatggctcttacgctgtttggtcgtagagaccttttaatatatggcccggaggcttgcttagatggcgacaatggctcttacgctgtttttgcctgtgggcttttttgtaggctttgttttctgctcgttaaggtcttttggaatatttttgcttgacccgtcttcggttctagaggaacttcgatttcaagtcgttgtcggcgatgttttgagcacctcaaaaggttcatagctcgtaggttgagtagatcaacactttggcggtttggagtcgacatggtcggggttcgtttttgcctgttaagggaaccctattttaaccggttcttttcgaagtatatttggagtagtgtcctgagattttagtaacagtcgggtgtccccgagtcatgttattttggctgtattaaccgttttgatcatagtcatgtgcgtttggccgtagccatttttaatcccgattgatagtttaggtgtctacaccgagggtatgccctttagggatttttacacatgcgacgtataacctaaacttcaggattttcatgtttgttgaggtcttacagttaatcattcctcttgaggtcttatagtttgtcatgcctgttgaggtcttacagtttatcatgcctgttaaggtcttatagtttgtgtaatatataatagatctggttacgttgaggctgcctgctaggggtctcacagtttcgatttttccagcatatgacgatcaatggcagtctctgagtcatataatttgtttaagcttgaagaccgctcctcatgagctcggagttgccttgtaggggcttgttgagcccggagttctaaccctggggtcgtgcgggtattgaattgctgatgctaagtctccgagtatctcgggatgcattcggtagagaggcccttgccatgagtatgttgaaatccccttttccgaagtacgaaatgccgaaaagatattctttattacttgtcataaatatatgttgtaaatacatgttctctcgtcgttgtgagctcggcccacgtaggtacgactcttcggaccatctgattcgttacaaggttccctcttgacactcagtctgatattttcggtccttctgagggaatggtgcccttgaaagaagatcatcgcccgtcgttcgattgtagaagaaggcatgtgattttgtcgtatcctgctggcaggaccctctttgggggtacactgctctgctaataatctttttggcgggaccctctttgggtctaaagtctgatcgagggaatagagcacaacgggccctgctaaggccttggatctccgtgtggagttagaactttcgaatgccccggctgattgcctgcatataagttagtgaaaaaataatgaaggagtgaagtagttcctcctcaccgcggggtgcgtaggtaacctttcgaggttcgggatgtttctgctgttccgaggcacgagccctaatacagccttctgctgtgttcaaccaagcttagcagaagatgcgattctgcttaccctttgatccttttgagggcggacgtattgatgccggcgatgcgttacatggtgagggttttcctctcgtcgtgtgcagctccttgtcgaatactttagtcccacccttgtcctggggtttcatccatttggtggagtagggtcgaagttgcctccggggaggcgtgcccgttgtcatctgaataagacgtacgtgccttgcgtgttcggcattccagtccgagctgatacgggttgtattaagggagtggtcttcctgatgtggcgatcggtgcctagaatctgtcaaagattcgagatgtgggagtgacttggttcgttagtccgaatcgccccattggctttggtttgacatcgttggtataattaattgaacaacctgtattcatgaacacatgttttatttggaataggtcaaatgagtgagagggttaccaacacatcaatacgaggccgaggcgaagtctcggcgtccctttccttggaagcaagggtgtcctttggaatattccccagaccagtgtttccccggtgatgagcattttcactttacattttatggcctttgaagggtgtcgccgccccttcactgtcgtggtaatacatcgtggcttgtcatcttcattcttcccggtctccttcctcccttggagttggattcgagcctgaccgctcgacgatactcggtggtgatttttattgaatagcacggttgtcgttcttttgagcgggtggccattttttactccgtagctgtgcgcgccctacggtttctgcgtcgggctatggttcttttgaaggggtcttggtagaataggtttgagtcgcctatcgttcttgttttagcttaaggtgatcatgatgttcggtaaagcaatgttgaaattgtacttagctgagcggggttcccctgctagctgtgccttgtcaaatctggttccattggagatttctcggggatgtttccctcgagctatttctctatcattgggaggtaagtaacaactcatgtcgttccttccattcgcggtgcatggagggtacctccatttgtttggcatcatcttctttgtcggcataccaaacctgaggaggttcctggacggaagtccacggccctgctccgtggatagtgtcaggtgcgtgtatccgaccatatctcgactgggtatctggtcaggatttgtttgaaatgtcctggagtcgtcgggcatatttcgtttaaccttcgggcggaggcccgggttgtccagtcatccgaaaccgggagcgatctcattcatcctaacagggaacgagacgcgacttcttgtagtgcttcactctctctttgtctagccccaggtgtgtcgagcccttttgttactgcttcgataacatcggtgtgtgctcccgtggagtggtctgctgatatggtaagcgagtttgcgaggccaggtgccaggctgcggtgctgcatcaaggtttttttcgagagtgtttcctcgaacttcctcaatgagtcagactcacactcatcattatggaggtctctgcctttgaataagcacgtgtaagcggtggtgcgctcgtagggacccaaggtcctatcgcacctagggagttttggcgttccagatttccgtgaagagagttccgggaccgcttccttaggagacggttgctgtaagaacttccacgaacctgactcgatcctttcgaagagattcccaagcatcctggggtcggttaccgatccgttgttgcttgatctcccgggtactcgctcggcgtagggagatgttttcggggctactacgctgggagtctctgggtggctttgcagctgagcgatagcaaactactatgcctgcaacattccaaaaataacatgaatactaacttcctattcttcccaggccgggggtttttgagcttcctgttggtcgatatgttgtatgctaccatcggtgcgcgaggcttcatcgacctattgtgcgccttgcaagcccgcgtccgcttgaattgatccagatgtgttatcggggtactgcggtgtcacgccagccactggaacagccataccattttcgtcgtgatttttggggtagtcattctcgactttgcttaccgagccggacattttaacctgaaatcaaaggatcttggacaagaaaaagtgtgaaagatagtgtgtatttgtgcaataaaaccagcaataaaataatcactattatttttagccctacggtgggcgccaaactgtttaccgtgaaaatggtaacaacaattaaatttgtaaatgagattctaaaaatacatgatctcgagctagttgttagagcagatgatgctaagattgtgaggtttaacgatgaagtgtgagctaaaatgaggcagtaaagaaaccgaaggggcctgttgcccggatgcaggaccggtcagagaggacctcggggtcgaggtttgagtcgggctcgagctatcgggggcagccaggaatgggataacaattaaggatacgatgaagcaaggctcttttcagccaataatgagctatatattgaagaacaagtaaaaggacgatatatattaaagcggcctcgggccagtgaggatgaacaagctagaaagaaaagagagagatatattattgcacttgtggagaaatggagcaacatcaggcccttacaaggtaggatgagtcccctttatataagaggggggactcgactacaagtatgtagagattaattacaaagtatggggatatgatggcttgacgtgatgcctcaacataggctctggataggccggccctgtcagaattagtcgtgtgccttgggagcttccccatctgtcctggcttcgatctccatttcttatgagtcaggcttcaatgagccccgaggttgggaactcgattgtggcctcccatcctcggggtcccaaggcatgcttccgaaatgactcgacagccagaaatcaagtcttctgattttgccgcgtacagagtatctacaccttggtgtcaagcttgcccgtgagtcttatattatgattattatgactttgtttgtattgttcatgcctttaatgatgatttcattgttgagcaaagcttgtggaagtagtgttggtaattgaatattgaggagtgttggctcaagttgtaaaagaattgtggaagtaaaattagtaattgaacctaatagagcattggctcaagttgtgtagtgagttgtgaagtaaacgtgaaaaagagaagaggattattatattgtctcccttgtcgagatgttgttgcttttagtgctatctcccttgccgggatattgatgttcttgatattgttccttgccaggatatgattgtgtactattatttccttgctgggattttattatgatttcatttatttcctttccattattttttatgattgttgattgggtgaggaagagtaaagcacgaagggtgatgtcgtacattgttttggtgagagagtgttaaagcacgaagggtgatgccgtgtataatttttgtgaggaagagtgtaaaagcatgaagggtgatgccgtgccgcacgatatacaattcagtgccgattatattaattttatggtgaggatgagagtaaaagcatgtagagtgatgtcgtgtacattatattgactcttatggtgaggacgagagtaaaaacacgaagggtgatatcgtgcacttgtttgatttctgattcttgttgataattgagttatgatgttccttgtaattacctgttgtccttctattatcatttgatgtttccacgcaacatgttcccccctcccattcttaactgtacacccctactgttattttcctctatatatgatataactgcacagatttatttggtagtctggtcctagcctcgtcactacttcgccgaagttaggctaggcacttaccaacacatagggtcagttgtgatgatactacactctgcactgtgtgcagatcccgacgcaataacttttggaccttagcttttgggttgctgccttcagtccatacagagatccaagatagtcctgcaggcgtccgcaggccctggcatctccctctatccttttgtcatgtttcatttacgtgtttcagaaacaatgttgtatttattttttagaccttgattattgtattcctagaccgtctgtgaagttgtgacaccagttctgggtagtccttatttaagaaattgtattggaaataattaaatgattttatttgtttttcttccgcttatttaaatttcgctgtttataaactgttagtttatcattattaaagtattaaaaatgggaaaaaggtaaattgctcaatggttggcttgcctagctttcactagtaggcgccattacaactcccgatggtggaaaatccaggtcgtgagagaaatacaaatagataaaaccgactaaatgttaccctatttggagcatataaattatgatatgtctacgttcaaaatttatggcacccagaatgttcaaatcctagtgttagcctcttcaaggataacccactcatataccaattgatgttttatacttcaataccacacaagagggaggtgatttatgtggtgtctaattttttgcgtgcaccagattataaaaggacctagttcttctatgtgttctttatactactattgcagaataataaatgcagaaagtaaaaaacacaaagatatttatgtgaaaaatacccgtctcaaaaggtgaaaaaatcacgacctactacccagtaggattttctctaaacactttactacaactcagagccaacaacaatgtttacaaactcttgcaaacctaaggattaattctaacccttatagcaaccatccacaggctgttgtgactgattcaggttaactctaacttgaataatacaactcgagtttacaaccttttgcaaacctaaggattaactctaactcttatagcaacatgctacaagctgttgtgactacttcaagttaactctaacttgaatgatacaactcaagtacctagtacaatttgcttctaagaaagctaaaaggtacagctcaaaatgcatactacactttgaactaaaaataaagaaagacacataaaactctttataaagctggtttttcaatctggttcgtgtagcttcaggatctcactcttaaaactcacaggaattgctcacaaaatgccttgctattttgcactcatttcattcttaacttcagtatgtgtgcatcacctgtaaagtgagaacatcatgcgatttatagagttagtagagtagaaaataactagagttctaatgctactcttccttggtggaagagttctagttaacttcaacccctatctcctttcttatgttggatagtgttctctttgagtaaggagtccttctccttatcaattatgtaatctttttgatcaggagatatcaaatataccaagttaaacttatctccttcacatgcatctcatatactcaaatctgcccgtgtctatgttcataaggggtcctggttcatgcctgatcttcctttgtcaatcttcaaaacaaacctttatttgggccaacaaattccccctttttgatgatgacaaaatctgtgcttttcataagcttaagccctgtttcaactcagctcaacatcaacacaatgttagaacattttatcacttattatcaaggaccaggttcattaggttataaacatcacagtccaaagaaaaagcacaacctaattcctcctttggcatcatcgaaaagttgcataattatgtgagataaccaaatttaaatagaaattaatcatggccactaggctacttcaaatgcaatcatagatttaagcatcatctataaatctaaggatattagtcatctaagaaatatcaacaaacagctagagcaaaaggcagtaaatttcattgattgataagatcctactacaaagcataaaaagaataagaacattggatcatgagcaaaagaaacaaaaaaatcctaagctgggtcactggttgatctacagtaggttaggaggattaaggctgggaaggaccaggttcttggtttttggcttggagcagtttcagcatatcctgaagaatgccctaattcttctcattctcttttgcaagctcagctctgagagcatctctctcggtctccatttcagccaacctcttctttagcctatcaggctcagcatcctttgccctactttcttgcaccaaaactcgcactttgctattcactggtacctttttggatgaaccaggttttttgggagtgatttgagcctcatagttacaagcagtcaaagtgttagccccaaaatgatccttgtttgtaccaacttcccatttcttgatgggtacctttaaatgtgcaagaacaatcgtgagaataaaaccatagggtatgacataagtcttagttccatttagaaccctgtcaagaagctgaattttagacccaggccaatttatttgccgcctattgtccaaacattccataaggaccaggtccatgaatgtggaaatgtgcctcctttcctaccttggcagcacacatttgtttacaaattggagcaacactttgttgggtggcttcatctcatttttgtaaatagccttgggctcaatttcctcctcattgtcacaaaattttctagtactggcaagggcagtagggagattctctaggcttgtccatttgagcttcttatagtcattgtatcctttagaatgcaccccaagatctctctcagctctttctcatcaaaagtcaccatcaccctttaccacactggtgaccctaccatcttgatctcacaatttgccataaactgcacaatatcagttatggccaaccttccatcatctgaaagaccatgtccttccatccttgcacctgtaacttctccagaagcattaccattccttcctcctctaagttcctgaggagcctacctttcaagatggttctcttcccaaacttaaccatcttgtccttctcaacatcggattcttcttcttcttcttcttcatcttcttcttcttcttctccactctttctcttcctccaccatttttcctttcttgatttcatagaaaacctgttcttttagacaaagtggatggaacaatagactttgtatttgaagtagacttctttgtagaagtcttgcctatcttagcttttggagtcacagtctccacttgttctatctcatcttcatcttgaaggaccaggtctatctcatcaatttaaacagcctcaacagtctcaaccatcttcttcttgtccttagtagcaacttttcttttactttcttctaaggctttgtccagttcatcctcactctgcttcttctaactcctagtagatcttccttttgtgggaggaatttctacagggatagaagaaacaaccttccttttcttgttggctctagtggtgccaggggttttaactcctagacttcgtttcttctttggattgtagctttcaatcactcttttcagtaggtctgtgagggtctcctgttcagatggaacaggttcatctacattttccctagttgaaccagcccctcagcaacttctccagacccacttccctctatttttctcagactctcctctatttcaacaaattcctcaccctaaactaccatatcacctgactctttagttagaccaacaggagtgcgtaaagattcagtcactccttttcccattccccttacagtacttcgataaccctctctctctttatcttttctcttttatttttacctcccacctttccagacttagtactttcaacacctgacatatatcctacaagaacaaacgtattcttcaaattcatagaaaccacaaaaatagtttcaagattaactttggggctagacgttacctgttcacactcagaaggaactgtttcttcccccttagttgtagatttgaatgactcatcagatttttggggttcttcttccctatttgctttcaaattttcattgattttattaatttgctctccaccaacaacaaccttgcgagccatcatttttacccttcctttattagagatgggagtagttgaaggtgtatcatatggtgtgggtaaggtttccttgggtggtgaagagggattatcagaggtgttatccatttctgtgcttggaagtaagaaaagaaagtttaagtgtgtttcgaagttgagaaaagatgaagagtagattaacgacttaaaaagtttaagtgaagaatacactaagcctaatcaatttaaagaggagtgtttaatggtagcgacagtctctcagaagtctaatcaaactgaattcctgttttgacaagatattggaaaggttccctacaatctaggcatttaatgcagtttggactcctcttttgaacaaactggtccatttttgtaatgtataagtatagtggggtttgatattgaatggtaatcttttcttaaacatgatctaaatataattatttcaaactatgcagagtagagaatacgtaccaaataatcttgatgaactgggttcttcattgaaaaatctcttgtgtaaacctgaatttcccaagaaaatagcgataatatcattagagataaacgagtcatattaacacatggcacaagagtatacttatgaaagtatgagaatgagcaaaatctaatctaattatgtaccaagttcataattttctaaccaaatttttgagttagaactggttctgtgatgactcggtcagtcgtctcatgagttaccactctgttttctcccttttatgcttcttattgctttgtctattagttctatatgtgatcgtgttggttggctcgggcttagaaaggatttggtaaggtttgagacacttagtcttttttgaggaagcttaagttggaaaagtcaactgaatgttgtcttatgtgttagagggctcggatgtgagttccgatggtttggatggcttcgagaggtgatttgggacttaggagagtgataagaatgtgttttggaggtccgaagtatatttaggcttgaattagcaaaattggatttttggcgtttttcgattgatacgtgagattttaatatattggtcaaaatggaattccgagagtctcattagttccgttgtgtcctttgggatgtatgtgcaaaatttcaggtcatgtggacgtggtttggttgggtttttgatcaaaaacgtaattcggaagatttttgaagacttaggcttgaatctgacgtgttttggttgattcgatgttgtttaaggtgttttgaagattggtataagtttgaataaggttatgggatatgtttttgcttttggttgaggtcctgggggcctcggggtgattacggatggttgacggagagtttggaatttgtggtgaagctgcagattttctgcttctattgtttccgcacctgcggattgggaaccgcaggtgcgatgccgcagatgcgataagagggggtcacagaagagcaaaggagctagggaggtagaaaccgcagaagcggttggaaaaccgcacctgcgatggcgcaggtgcggatagtgaatcgtagatgcgaaaatgagaacttaagtgaggaccacagatgcgatggtcttgaccacagaagcgataccacaaaagcgagaatttgaccgaagatgctaaatccctgggctagaacatataaattgtttccttcgcgttttttgagctattccaccatttctaagtcggctttggagctttttggactattttgaagaaagatttcaagggaacttcattgaggtaaggagtttggacctaaactcgttcctaaggtattattttatggattagagctgtaattaatggaatttaagggttaaaattggggaaactagggcttgatattggagacctagacttgaggttttgatggaccatttgtggttgtattttggtacttttgatatgtatgaactcgtgggaagataaggagcctacctttcaagatggttctcttcccaaacttaaccatcttgtccttttcaacatcagattcttcttcttcttcatcatcttcttcttcttctccactctgttcgtcttcctccaccatttttacctttcttgatttcatagaaaacctggttcttttagacaaagtggatggaacaatagactttgtatttgaagtagacttctttgtagaagtcttgcctatcttagcttttggagtcacagtctccgcttgttctatctcatcttcatcttgaaggaccaggtctatctcatcaatttaaacagcctcaacaggctcaaccatcttcttcttgcccttagtagcaacttttcttttactttcttctaaggctttgtccagttcagcctcactctgcttcttctaactcctagaagatcttccttttgtgggaggaatttctacagggatagaagaaacaaccttccttttcttgttggctctagtggtgccaggggttttaactcctagacttcgtttcttctttgaattgtagctttcaatcactcttttcagtaggtctgtgagggtctcctgttcagatggaacaggttcatctacattttccctagttgaaccagcccctcagcaacttctccagacccacttccctctatttttctcagactctcctctatttcaacaaattcctcaacctaaactaccatagcacctgactctttagttagaccaacaggagtgcataaagattcagtcactccttttcccattccccttatagtacttcgataaccctctctctctttatcttttctctttttatttttaccacccacctttccagacttagtactttcaacacctggcatatatcctacaagaacaaacgtattcttcaaattcatagcaaccacaaaaatagtttcaagattaattttggggctagacgttacctgttcagactcagaaggaactgtttcttcccccttagttgtagatttgaatgactcatcagatttttggggttcttcttccctatttgctttcaaattttcattgattttattaatttgctctccaccaacaacaaccttgcgagccatcatttttacccttcctttattagagatgggagtagttgaaggtgtatcatatggtgtgggtaaggtttccttgggtggtgaagaggaattatcagaggtgttatccatttctgtgcttggaagtaagaaaagaaagtttaagtgtgtttcgaagatgagaaaagatgaagagtagattaacgacttaaaaagtttaagtgaagaatacactaagcctaataaatttaaataggagtgtttaattgggtagcgatagtctctcagaagtctaatcaaactgaattcctgtttgacaagacattggaaaggttccctacaatctaggcatttaatacagtttggactcctcttttgaacaaactggtccatttttgtaatgtataagtacagtgggtttgatattgaatggtaatctttctaaacatgatctaaatataattatttcaaactatcagagtagagaatacgtaccaaataatcttgatgaactgggttcttcattgaaaaatctcttgtgtaaacctgaatttcccaagaaaatagcgataatatcattagagataaacgagtcatattagcacatggcacaagagtatacttatgaaagtatgagaatgagcaaaatctaatctaattagttacaaagttcataattttctaaccaaatatttgagttagaactggttctgtgatgactcggccagtcgtctcatgagttaccactctgttttctcccttttatgcttcttattgctttgtctattagttctatatgtgatcgtgttggttggctcgggcttaaaaaggatttggtaaggtttgagacacttagtcttttttgaggaagcttaagttggaaaagtcaaccgaatgttgtcttatgtgttagagagctcggatgtgagttccgatggtttggatcgcttcgagaggtgatttgggacttaggagcgtgataagaatgtgttttggaggtccagagtatatttaggcttgaattagcaaaattggatttttggcgtttttcgattgatacgtgagattttgatattgtggtcaaaatagaattctgagagtctcattagttccgttgtgtcctttgggatgtatgtgcaaaatttcaggtcatttggacgtggtttggttgggttttcgatcaaaaacgtaattcggaagatttttggagacttaggcttgaatctgacgtgttttggttgattcgatgttgtttaaggtgttttgaagattggtataagtttgaataaggttatgggatatgtttttgcttttggttgaggtcctgggggcctcggggtattacggatggtttgacggagagtttggaatttgtggtgaagctgcagattttctgcttctattgtttccgcacctgcggattgggaaccgcaggtgcgatgccgcagatgcgaaaaaagggggccgcagaagcgcaaaggagctagggaggcagaaaccgcagaagcggttggagaaccgcacctgcgatggcgcaggtgcggatagtgaatcgcagatgcgaaaatgaggtcttaagtgaggaccacagatgcgatggtcttgaccacagaagcgataccacaaaagcgagaatttgaccgaagatgcgaaatccctgggctagaacatataaattgtttccttcgcgttttttgagctattccaccatttctaagtcggctttggagctttttgaacgattttgaagaaggatttcaagggaacttcattaaggtacggaatttggacctaaacgcgttcctaaggtattattttacggattagagctgtaattaatggaatttaagggttaaaattggggaaactagggcttgttattggagacctagacttgaggttttgatggaccatttgtggttggattttggtacttttgatatgtatgaactcgtgggaagataagcagcctacctttcaagatggttctcttcccaagcttaaccatcttgtccttctcaacatcggattcttattcttcttcttcatcatcttcttcttcttcttctccactctgttcgtcttcctccaccatttttacctttcttgatttcatagaaaacctggttcttttagacaaagtggatggaacaatagactttgtatttgaagtagacttctttgtagaagtcttgcctatcttagcttttggagtcacagtctccacttgttctatctcatcttcatcttgaaggaccaggtctatctcataaatttaaacaacctcaacaggctcaaccatctccttcttgcccttagtagcaacttttcttttactttcttctaaggctttgtccagttcagcctcactctgcttcttctaactcctagcagatcttccttttgtgggaggaatttctacagggatggaataaacaaccttccttttcttgttggctctagtggtgccaggggttttaactcctagacttcgtttcttctttggattgtagctttcaatcactcttttcagtaggtctgtgagggactcctgttcagatggaacaggttcatctacattttccctagttgaaccagcccctcagcaacttctccagacccacttccctctatttttctcagactctcctctatttcaacaaattcctcaccctaaactaccatagcacctgactctttagttagaccaacatgagtgcgtaaagattcagtcactccttttcccattccccttacagtacttcgataaccctctctctctttatcttttctctttttatttttaccacccacctttccagacttagtactttcaacacctggcctatatcctacaagaacaaacgtattcttcaaattcatagcaaccacaaaaaaagtttcaagattaactttggggctagacgttacctgttcacactcagaaggaactgtttcttcccccttagttgtagatttgaatgactcatcaggtttttggggttcttcttccctatttgctttcaaattttcattgattttattaatttgctctccaccaacaacaaccttgcgagccatcatttttacccttcctttattagagatgggagtagttgaaggtgtatcatatggtgtgggtaagttttccttgggtggtgaagagggattatcagagatgttatccatttctgtgcttggaagtaagaaaagaaagtttaagtgtgtttcgaagatgagaaaagatgaagagtagattaatgaattaaaaagtttaagtgaagaatacactaactaatcaatttaagaggagtgtttaattgggtagcgacagtctctcagaagtctaatcaaactgaattcctgtttgacaagacattggaaaggttccctacaatctaggcatttaatgcagtttggactcctcttttgaacaaactagtccatttttgtaatgtataagtacagatgggtgtttgatatggaatggaatcttttcttaaacatgatataaatataattatttcaaactatgcagagtagagaatacgtaccaaataatcttgatgaactggttcttcattgaaaaatctcttgtgtaaacctgaatttccaagaaaatagcgataatacattagagataagtcatattagcacatggcacaagagtatacttatgaatgtatgagaatgagcaaaatctaatttaattatgtacaaagttcataattttctaaccaaatttttgagttagaactggttctgtgatgactcggccagtcgtctcatgagttaccactctgttttctcccttttatgcttcttattgctttgtctattagttctatatgtgatcgtgttggttggctcgggcttagaaaggatttggtaaggtttgagacacttagtctcttttgaggaagcttaagttggaaaagtcaaccgaatgttttcttatgtgttagagggctcggatgtgagttccgatggtttggatcgcttcgagaggtgatttgggacttagaagcgtgataaaaatgtgttttggaggtccggagtatatttaggcttgaattagcaaaattagatttttggcgtttttcgattgatacgtgagattttgatatatgggtcaaaatagaattctgagagtctcattagttcctttgtgtcctttgggatgtatgtgcaaaatttcaggtcatttggacgtggtttggttgggttttcgatcaaaaacgtaattcggaagatttttggaggcttaggcttgaatctgacgtgttttggttgattcgatgttgtttatggtgttttgaagattgatataagtttgaataaggttatgggatatgtttttgcttttggttgaggtcctgggggcctcggggtgattacggatggttgacggagactttggaatttttggtgaagctgcagattttctgcttctattgtttccgcacctgcggattgggaaccgtaggtgcgatgccgcagatgcaataaaagggggctgcagaagcgcaaaggatctagggaggcagaaactgcagaagcggttggagaaccgcacctgcgatggcgcaggtgcggatagtgaatcgcagatgcgaaaatgaggacttaagtgaggaccacagatgcgatggtcttgaccacagaagcgataccacaaaagcgagaatttgaccgaagatgcgaaatccctgggctagaacatataaattgtttccttcgcgttttttgagctattccaccatttctaagtcggctttggagctttttggacgattttgaagaaggatttcaagggaacttcattgaggtaaggagtttggacctaaactcgttcctaaggtattattttacggattagggctgtaattaatggaatttaagggttaaaattggggaaactagggcttggtattggaaacctagacttgaggttttgatggaccacttgtggttggattttggtacttttgatatgtatgaactcgtgggaagataaggaacctaccgatgtgaatttcctcgaatttcgagacatgggcctgggggtcgggttttggtaatttcggaatttgtgttgtatattgattattttcgcataggcttcgttcccttaacagattttgacatcgtgattctaattttggatatatttgatgcgagtgaaggccgattccagaggcaaaggcatcgcaggctagatttggactagattgaggtgagtaatgattgtaaatgatgtcttgagcgtatgaaatcccggattgcacatcgttgtgccatattgaggtaacgcacatgctagatgacgagcgtggggtcgtgcattgttggggattgtgacttagtccatcccgaatgactattttaccgtgtatttgactgaaaattgtttgctatcattatgtttgggctgaatgccatatttgggcctcgtgccaactatttgaacccttaggggatttttactgatatttcctcactgttttgactttatacttgaactcagtcatgctatattctactattttcataactcagtcgtgtttactctactttaacacttaaatgagattttaaatgatcttttgagctgagcatcatgttttactatttcccgtgtggcctaagagaattttgactgagtaaggccgagggcctataatgtgaggaaacacctgattatgattatgaggccgagggcctgagatttgtacgccacaaggtggcttgttgatatgaggccgagggcctagtggtgatgccacgagatggcttgatattactcttaggccgtaaggggcccctctaggagtctgcacatcccagtgagtgcgggtacccattgtgatataagatatagcccaaggggctagtattgtttttgagatattgcccgaggggcggatttgttgacactgtgcccgaggggcgatcctttatgtgtttatcattcctaattgcctgtcatttgcttgcttaattgttaaaaaggcactttatgaagttgtaaactgaactagtaattttacacatctttactacttcactgttttactggcttttactgcttccttatagcctataatgtgccttatatgatttcttgctttcagtctttatttatgattgttactcactgagttggagtactcactttactccctgcaccccatgtgcagattcaggcgcatcaggtcctgctagcgagtattaatcttttccagctcaggcagattcgaagattctctaggtagctgccggcgttcgcagcctagagcttcttccgttatctaatcttcctctattttaaatttgtattagactatgtagacctttcttgtatcatacggattgtagatgctcatgactagtgacaccccggtatcgggttgtgttggttttacttctgcattgtactattcactacttactttgggtttatttattaagtattagaattaattcttattgtttaatttcttaaaaatgaaatgggaaagtgtcggatgcccttgtctttatgagaggtgccatcacgaccgggtccgggtttagggtcgtgacaagttggtatcatagcctaggatacataggtctctcgagtcatgagcaagtttagtatagtctcgtggatcggtatggagacatttgtatttatcctcgagaggctgtagaatctttagggaaaccttcatattcttgaaattcttgtcttgcgaatttgttgatccgagtactaaacttatgttattctattctctcatagatggtgaggacacgcgctaccagtcaagatggacgaccaccagcaccaccagcgtggccactagagtccgaggatgcggtcgtggttaccgtagggacataggtgtggcccacatagtagctagagcagcacctgcaaaatccttctatcgccctagttcaggatcaggtcccagttgtggacgctccagcagcactagctcaggcaccagttgtgcccattgtgattcagggtcttcaggaggccttggctcagattttatcagtatgcactggcctagctcaggcagtttcagtcagtacagccacaactacttcttaggctagaggaggcactcaaactcccgccgcttgcacacttgagcaggtcgtgcagggacttcagacaccggggatgcatctagccgagccggttatagctgctcaggactatgtggttcctgctatgctagaggacgaacaacataggttggagaggtttggttggcttcagcctccgaccttcagtggtgcagatggcgagaatgcccagggtttcttggataagtgttagaggatgctttgtacaacgggtattctggagaccagcgtggtcgctttcactacttatcagttttctagaacatccttcacttggtgggagacttttgagaggcgtaagcctattggtgcagcaccccttacctagcagcatttctccgttctctttttggagaagtatgtgctgcagtctcatagagaggagctgcgtaggtagtttaagtggttgcatcagggagagatgactatgatgtagtatgagatgaggttcttcgagttagctcgttatgctatttggttggtttggattgatagagagaggagtaggaggtttgttgatggccttacttatcagcttcgtactctcatgaccagggagagtgtgactggtgcgacttttgaggaggttgtagacatcgctagtgagattgagtttgttcattgctaggagcgagaggagagggatgccaagaggcctcgaggatctggtagttagagtagtgctccttcgagaggtcagtttcagcacggcagagggcatccatttaggcatgctcagccagctcgcccaggttatcatggggcatcatcgagtcatggttctcacagttctcatcagggccagtcatcacttagtgcctttctagcttagagtttatctcgtgctcaatcagttcagggatcttctatgctaggtgcatctactagtcattccggtgctaggggtcccttcagtccccttctccagcactcgagagttgctatgagtgtggaaagatgggtcatatgtggaggcagtgtcctcgtcgtcttgcgggttcatctcagcagaggagtcagtcatcggcttcagcacgagttacttcaccatcacctgcccagccagctaggggtggaggttaggtatctagaggccgtcccaaagggggaggtcgatcagatggcggtcaggcccgtttctatgcacttccatctagacccgatgctattgcttttgatgctgttattataggtattgtttcagtttgccctagagatgcctctatattattgcctggttccaccttttcttatgtgtcatcatactttgctcgttatttgggtatgccccgtgagtctcttgtttcacctgttcatgtatctatcctgatgggcgatactattattgtagacaatgtgtaccggttgtctgtagtgactattggggatctggagaccctagtagatcttttattattgtgtatggtggatttcgatgtcgttttgggcatggattggttatctacaagtcatgctattctggactatcatgttaagacagtcacattggctataccgggtgtgccacagattgagtggcaaggtttgactgattatgttcccagtagagtaatctcatttttgaaggctcaacgtatggttgggaagtgttgtctttcgtatctagcctttgtgagggatgtcggtggagagactcccagtattgatttcgttctaattgtgagggattttcatgatgtgtttcctgcagacctaccgggcatgccaccggacagggatattgactttggtattaacctggtgccgggcactcagcccatttctattatgtcgtatcgtatggcaccagcagatttgaaggagttaaagaagcaacttcaggaactccttgataagaggttcatttggcctagtgtgtcaccttggggtgcgctagttctatttgtaacgaagaaggatggcattataaggatgtgcattgattataggcaattgaacaaagtaacaattaagaataagtatcctttgcctcatattgatgatttcttcaaccagcttcagggagtgagagtgttcttcaagattgatctctgttcaggttatcaccttgggctaaccaatgccccagtagcattcatgtacttgatgaacaacgtgttccttacttatctagactcgattgtcaaattcttcattgacaatattctggtgtatttgcgtagttaggagtagcacatggagcatttgagagttgtgttgcagagattgagggaggagaaactttatgcaaaattcttcaagtgtgagttttggctcagttcagtggctttcttgggacacgtggtgtccagtgagggtattcaggttgacccgaagaagataaaggcggttcagagttggcccagaccgtcctcagccatagagatttgcatatttcttggtttggcgggttattatcgctggtttgttcagggattctcatctatcgcaccgcccttgaccaagtttactccgaagggtgcttcatttgtatggttaaatgagtgtgaggagagctttcagaagctcaagacagccttgatcacgactccaatgctagttttgccatcagcttcaggtttatataccgtgtattgtgatgcttcaagagttggtattgggtgtatattgatgtaggagggtagagttattgcttatgcttctcgtcagttgaagtcccatgagaagaactaccccgttcatgatttggagttggttgccatagttcacgcgttgaagatttggagacattacttgtatggtgtgtcttgtgaggtgtttactgatcatcgtagtctccagcacttgttcaagcaaaaggatctaaatttgtggtagtggaggtggttggagttgctaaaggattatgatattactatattgtaccattcggggaaggccaatgtggtggccgatgctttgagctgaaaggcagtgagtatggggagtttggaatatattccagttggggagagacctcttgcagttgatgttcaggccttgtccaatcagtttgtgaggttagatattttggagcccaatcaggtattggcttgtgtggttttttggtcttccttatatgatcgcatcagagagtgccagtatgatgatcctcatttacttgtccttagggacaaagttcatcatgatgataccagagatgtgaccattggtgatgatggggtgttgaggatgatgggccagatatgtgtgcccaatgtagatgggtttcgggagtttattctggaggaggcccatagctcgcggtattccattcatccgggtaccgcgaagatgtatcactatctgagacagcattattagtggaggagaatgaagaaagacattgtgggatttgtagctcggtgtctcaaatgtcagcaggtgaaatataagcatcagagaccaggtggcttgcttccgcggatggatattccagagtaaaagtgggagaggatcactatggactttttagttggactcccacggacatttaagaagtttgatgctatttgggtgatcgtggatcggctgaccaagtccgcgcacttcattcatgtgtgtactacttattgtttagagcggctagcagagatctatattcgggagattgttcgtttgcatggtgtcccagtttccatcatttcagataggggcactcagtttacttcgcagttttggaggtctgtgcagcgagagttgggtactcaggttgagttgagcacaacttttcaccctcagatggacgggcagtccgagcgcactattcagatattggaggacatgttgtgtgcttgtgtcattgattttggagggtcatgggatcagtttccatctctcgtagagtttgcttattacaacaaaccagttgagtattcagacggctccatatgaggctttgtatgagaggtggtgtagatctccagttggttcgtttgagctaggtgaggctaggctattggggatagactgggtgcaggatgctttagaaaaggtgaaggtgattcaggagaggcttcgtacagcgcagtcgagacaaaaaagttatgctgacaggaaggttcgagatgtgtcctacatggttggcgagaaggttctgttgaaggttttgcccatgaagggtgttatgatatttgggaagaaaggtaaattgagtcctcggttcattggggcttttgaggtgctttgcaggattagggaggtggcttatgagcttgctttgccacccagcttgtcgagtgtgcatctggtatttcatgtttctatgctcgaaaagtatattggggatccgtcccatgttatggatttcagcacggttcagttggatggtgatttgatctatgatgtggagccagtagctattttgggtcgtcaggttcgaaagttgaggtctaaggatatagcttcagtgaaagtgcagtggggaggtcagcccgtggaagaggcgacctagcaggctgagcgggagatgcggagcagatatcctcacctgtttgaggcttcaggtatggttcttaactcgtttgaggatgaacgattatttaagagagggaggatgtaacgatccgactagtatctcctgagttaccactccattttccccattttctgcttcttatttctttatctatcggttctatatgtgatcgggttggttggctcgggttcggaaaggatttggtaaggtttgagacacttagtctcttttgagtaagcttaagttggaaaagtcaaccggatattgacttatgtgttagagggctcagattgtgagtttcgatggtttggatagcttcgggaggtgatttgggacttaggagcgtgatcgaaatgtattttggaggttcggagtagatttaggcttgaattagcgaaattggatttttggcgtttttcgattgataggtgagattttgatataggggtcagaatggaattccgaaagtcgcagtagtttcattatgtcatttggtatgtgtgtgcaaaattacaggtcattcgaacgtggtttggttgggtttttgatcaaaagcataattcggaaggtttttggaaacgtaggcttgaatttgatgtgttttggttgattcgatgttgttcgaggtgttttaaagattggtataagtttgaataagattataggatatgtttgtgcttttggttgaggtcccgggggcctcgtggtgattttggatggttgacagagagtttggaattcgtggtgaagatgcagattttcagcttctgttgtttccgcacctgcggattggggaccgcaggtgcgatgccgcagatgcgatgaaagggggccgcagaagtggaaaggagatagggaggcagaaaccgcagaagcggttggagaaccacacctgcgatggcgcaggcacggatagtgaattgcagatgcgaaaatgaggacttaagtgaggaccgcagatgcggtggtcttgagcgcagaagcaataccgcagaagcgggaatttggccgcagatgcgaaatccctgggccagaacatataaattgtttccttcgtgatttttgagctattccaccatttctaagtaggctttggagctttttggacgattttgaagaatgatttcaagggaacttcattgaggtaaggattttggacctaaaactcgttcctatggtattatttcacgaattagagccgtaattaatggaatttaagggttaaaattagggaaactagggcttgtattggagacctagacttgagggttttagggactatttgtggtcggattttggtacttttgatatgtatgaactcgtggggattgtaaggaacctattgatgtaaatttcatcgaattccgagacgtgggcccgggggtcggattttggtaattttgggatttgtgttgtatattgattattttcgtatgggcttcattcccttagcatattttgacatcatgattctgattttggatagattcgacgcgagcggaggacgattcgaggggcaaaggcgttgcgggctagatttggactagattgaggtgagtaataattgtaaatgatgtcatgagggtatgaaaccccggattgcacatcgttataccatattgaggtgacgcacacgctagatgatgagcatggggtcgtgcactgttagggattgtgacttagtccgtcccgaatgactattttaccacgtatttgactaaaaactgtttgttatcatcatgttttgggctgaatgccataattgggcctcgtgccaactatttgaacacttatgggatttttactgatattttctcactgttttgactttatacttgaacctagtcacgctatattctactgttttcataactcagtcgtgtttactctactttaacacttaaatgagattttaaatgatcttttgagttaagcatcatgttttactattgcccgagtggcttgaaataattttgactgagtaaggccgagggcctatgttgtgaggaaacacctgattatgattatgaggccgagggcctgagatttgtaagccacaaggtggcttgttgatataaggccgagggcctagtgatgatgccacaagagtgcttgatattgcggttggtccttaaggagcccctccaggagtctgcacatacctagtgagcgcgggtacccattgtgatgtaagatatagcccgaggggctagtattgtttctgagatattgcccgagggtggatttgttgacactgtgccagaggggcgatcctttatatgtttatctttcctaatttcctgtcatttgcttgcttaattgttaaaaaggcattttatgaagttttaaactgaactcggtaattttatacagctttactgcttcactgttttactagcttttactacttccttatagcctataatgtgccttatgtgatttcttactttcagtctttatttatgattattacacactgagttggagtactcactttactccatgcaacccgtgtgcagattcaagcgcatcaggtcccgctaacgagtgttgatcttttccagctcaggcggattcgaagattctctaggtagttgtcggcgttcgcatcctagagcttcttcctttatcttatcttcctctgttttaaatttgtattagactatatagacctttcttgtatcatccggattgtagatgctcatgactagtgacaccccggtatcgggctgtgttggttttacttctacattgtactattcactgcttactttgggattatttattacgttttagatttagttcttattgtttaattgcttaaaactgaaataagaaagtgtcggctggccttgtcttcatgagaggtgccatcacgaccgggtccggatttagggtcgtgacaggttccttttaggtgatcttaatcatccctaattcaacatgttcctttcaaagtgatctctacttagagcttttgtgaagatgtcagctattttcttgtcagtagcacaaaattccatagtaatcaaccccttctcatagttgtccctcaaaaaatgatgcctaacatatatttgcttagttctattatgatgaaccggattcttggtcacactaatggcactagtgatatcacagaatatagggatacaacctatatcaattccaacatccattaattgttgtttgatccataataattaagcacaatatgaggcaccaacaacatactcatattcgccagtagatagcgctacagaattttactttttagtagcccaagacacaagacatgagccaagaaagtgttccatacctgaggtgctctttctattcacaagaaaacctacataatcagcatcaacatatcccactaagttgaaattactaccttttggataccatagacaaaggttagtggtgcctttcaagtatctcaagactttcttgatggcagtcaagtgagactcctttggattttcctgaaatcgagcacaaaggcctacgctaaaaacaatgtcaggcctgctggtagtgagatataacaaagagccaatcattcctctatacaacttctggtcaacagatgaacgaggttcatctatatccaatttagtggatgttgcaataggagtgttaatttctttggatgttcctttctggttttgttactaaggaataggttcatggacaagttccctcgaggtttgaggattagttcctctctagtcacttcgccttgtcaggttgcccacggtggaaacccccattccatcacctatttcttcctgtgatgcagcttcaggctagactgtggcttcatcatttgagtttcttgtcagtccaatatcttcatcatcttgttcctgcttctcggaaagaattttagtttcaaaaataacatacacactttcttttacatacatagttcttttttatatatcttataagctttactatgtgaagaatatcccaaaaatactctctcatcacttctgggatcaaacttacctagggagtcttttacattattgtgcgcagagcacttacatccaaatgccctaaagtaggatatatatttggctttatccctttaaatatctcatgggaagccttcttaacaagaggtctagttatgcaactatttatgacgtagcatgcattattcataacttctgtaacattctcaaattcagtatcatgatcagacctaattgatgcaagttgattatctagatttttctgagtttttctaaaaaaaaatgaagtgaacatgtcaaatacttcatctctagatgttaaaaacagtgtacaagtaaacctagagtaatcatcaacatataccataacatatctcttaccacctctgctcaatgttctcattcgtccccaaaaatccatatgggccagttccatcgttctggtggtgcttaccattttcttgcttttgaaagaagatcttacctgcttctcccttgtacaagcctcacaaactttatcttcctcgaacttaattttaggcagccctattaccaagttcttgaagactagtttgttgagtcaacttagattatcatgtctaagtctcttatgcaaaagaaggggatcactgtccaggacactcaagaaagtgagttcattatcgaaaagtatggacagatctacaacatatatatttttcactcttcttcctggcaagactttccgactccaatgattttaccttgctttctcttttcagaggagacattacctcttttaaaggccacaagtgaatggaacattttctaatttcctgtcatgtgttttgagcaaccttttatcatatattatttttggttgctctttatcacttggacctataaaagaatatcagaggttagtcgtaggaacccaaactagtttgggtccctttctataggcaaaaggataaattaaattctttttagcccaacttggcaacatttttccctagaataaaatttttattcttttgatctgccttttcttttgtaatgcaatcactcttgtagtgacccgtgtttctacagtgtgtgcaaatcttattctcagggaatattaggtacttatttttgggatcccatttaggtgcagagttcccaatgctaagtccctttctattgctactatggtattcttgtagtcatgaaagtgcatcaaaggatctgttccatttacatgttctatctaacttatgcttaatcttagtcaagtcatccttcaaggttcttaccagttcatcccttttataaagctcatcttttacctttcctagatccttttctagtgagagttgtgtgtcactggctatttctttacctgttcctaacttcaatttcagattctcagatataagttctaagacaaatgtatcaagtgcatgaacctggttcttcaaagcagtattttccttttaagttttacaaatgtttattttcaggcttttgcattttgtttttaaatagttaccctcttttgataactgttctttttcataacttatattcttagattcatcaattaaagttagaaacaattttgatagtctatctttagaaaggagtttaattttattcttaaggtccagaaaacttatctcatattcttgatcaggttcattttcaaattcttgaattgctatgagagctcgttcaacattatcatcaatgtcttcatctgaactatctttccaagtagcaaccattgctttagatgaccttttgttgtagttcttcttgtcatgaacctgttccttatttcatatttctctttttttcactcgactttccatataggacagttcttgatcatgtggttttttttaccacatttgaagcatccatcagtcatctgcaagtgatctcttctcctctccttccacaaaaaataatagtgatcattgaatagtggtggcctagtggtagattgctctttagagttttcagatagtgcactcatcttgatcttttcctaaggtatttgcctcttcaagtataatctgctctgataccaattgatattttttacttcaataccacataagagaggggatggggtgatttgtgtggtgtccaattttttttgtgcacaaattatagaagaacctggttcttctatgtgttccttatactacagttgcagaataataaatgtagaaagtaaataacacaaggatttttacgtagaaaacacccgcttaaaatgtaaaaaacccacaacctgctacctagtaggattttctccaaacacttcactacaactcagagccaacaacaaagtttacaaactcttgcaaacctaaggattaactctagcccttatagcaaccagccctaggctgttgcgattgcttcatgttaactctaacatgaataataaaaatcgagtttacaacctcttgcaaacctaaagattaactctaatcattatagcaacccgccacaggccgttgcggctacttcacattaactctaacttgaatgatacaactcaagcacctagtacaatttgcttctaagaaagctgaaaggtacaactcaaaacacatactacactttgaactagaaataaagaaagacacataaaactctttatggagttggttcttcaatctggttcgtgtagcttcaggatcacactcttaaaactcacaggagttgctcacaaaatgccttgctattttgctctcaatttgctcttaacttcagtatgtgtgcatcacctgtaaagtgagaatatcctgtgatttatagagttagtagagtagaaaataactagagttctaatgctactcttctttagtggaaaagttctagttaccttcaacctctagctccttccttattttggatagtattcactttaagtaaggagtccttctccttattaattatgcaaccttttcgataaggagatatcaaatataccaagttaagcttatcttcgtcacgtgcatcccatatgctcgaatctgcccgtgtctatgctcacaagggatggacctggttcatgcctgatcttcatttgtcaatcttcaaaacaaaccttttcttgggccgacacctagttctgcctctaattgatatcgctttccatcaaaattatattcattgatacaaccgttattcacgaattaatatagttaatacaacttttccatcaaaacggtatttattgatgcagcctgacaatgaattgatacaacaaaatttgaatttggttgtatgcgtttgatacagcgaaattgaaatacattacctacgaatgataattaggccaactataactatgttaataattggactctaaactataatactttttgaaaattcctctacaatgaaacacaacccaatgattttcaaaacaaatgggctaactgagctttattagtccaatgtcattatccgatgatccactaatggtggatatgttcagggtatccgtaagtatatatatatatatatgtaggtcccttctgctcacataatctcattttttaaattttgtgcatatagtttaggaccgatcatcagttttaacacatacctgtattgtatataaactttattgttttggcatatattctataaataatgacatgctggggcggatcgacataatatgaggcctaaggcgaaaattaaaagtgaggccttaatttttttctctcttataatttatcgaaatttataatcagttttaattattgccaatgtctaaccaatttgtttaatctctcttgtattattttgttgaactttattgacttagtttttaaaaactttttcaaccgagacaactgatatagaaaaatccaacctattttaatttaaaaatctcaagttaatttgttaattaacaatattgaattaacactttttagctgattaagtttacccattagagtattcttctacgtatacagtttctcttagcacttttaaatctaaatataagttgaaacaaataatattatagtaactactatgtttcaagagtcaattaatgttaaggacaaattttaatagttactaatcaaagtagcttgaaaaatgtctacaaatgcactcaaagaattaagaaaaactgttctaaactaacattgtaagaagatcaacttaagttgggacgaattaaagacagaaaataactagtaactgaaatttaatatttgtaaaacttttagctataactattttaaccaaatgatttaaaatttctaacaatagtatataattatcaaaatattatatatatatattatttttatattttggggccgtaagtattttgggggcttaaggccattgccttagtggccttaggcgccagctgggcctgatgacatgcatgcaaagaaaaagacaaaaaaaaaaggaaaagaaaaaggaaaatgttatatgaaaaattaaatcttacaagaagtatttgctggtaagttgactcgacaatgcatggctcgctttcaaggaatacacaaatggattttctaactttattcaaaggccaaaagcataagtaagtttaagtaggcgtttggccataagttttggaagttttttttaaaaataaaaaattcaaatatatgtttgtttatagaagtaattatgtcacgaccaaaatcgatggttcgtgacgggcacccgatatcttactcaaccgagtaccaacataatgtatcttttcatatcatactatcatagataactgggtcggagaggccaccgtgaaataggtagaatacaatatgtaataccaacttatacataagacatatgagcctctaagaccaaaataatcactcgtgcactgaacataggttgtcaaggccatacaatctcttacatacatgatatttgtctacaagcctctaaggatacataattgttataaaggtagggacagaaccctccataccaaacaatacacatataaatcatactgaccaaacaagcaactccggagcaaatggagagcaccaacatcttccgctgagttgatcgcctacttagaggactcttgacctatctatcgagacctgcggacatgaaatgcagagtcctcaagcaaaaggaacgtcaatacgaataatgtaccgagtatgtaaggcacataaataagtacgtaaaagacatggaagaaatataaagtaaatgactcaacctgtaagtctggataactctgtaaattatgaaatacttttagtgtcatgcatatatgtatgaatgtcatgtcgtgtataggtacatgtgttcataacatcatcaagcctctgagggcatcccatcatatcatctcgtccactatgggcaaaatcatcaacgtataccagctgatcaggtggtggtgcgtatacaatatcgtaaccttttcccatatcccatatacatataatatacatatatatgcatatataacgccatctagtcatgggtcaatgtacatgtataaatgcatgaaatgcataagaaaatatgtcaataagattttctcagaatgccataaaaattcatatgcctttcggataaactttatcaaatacgtatttttctgagaccgtgaatagaagatataataataatctacattgggaatcaagaatatagacacccctagtatttctatgattagagtcatttattgaaattgtgcatttactcgtttcgtttgtgacgtatagatcatgccaaaagaaataagggatagtcttaacatacccggaccgattctcttaacaattcttctaacacacgtcttatgtgaaaaacatgtaatgacagattgaagtagagaaaaatccgtatgatattcttgagaaaaattataccaggcttcgttagaatttcaaaaatatcacatttctaagatatgcttgcttgaatttattgaaacagaatgccagtcacgttactaaggcaaattgcctaccattttttatataagcaactctttttagagaggtcttatgttttaatgctgtaggccccactaatttagtgacttggccacaaatcttactaagttttgacaccttaatatgtgacattaagagtcacaatttagagctagtcttgctgccacgttttagggtgggaaagcttaatctttatccagtaattaggtaacgttctattacccggtaattaatcaattatttgcataattaagaaatgtctcaaattactttaaaatactactcatttttaatatactttatatataccttatgtcgtagtcatgtggtacctcgtatggcactagtccataaataccgagtattttagatcgggttgtattcagtcagctcttcaggtttctcacggtgcttcaggtagccgtagtccgcagatgcaatattctgatcagcagtcctacagtgcaccaccagctcctatcagtgcactgctgctccagagttttcggggtggttattcaggtcgccagggtcagtctcagtttcctcagccacaacacttaggtggatgttttgagtgtggtgagtatggttatattaggaggacttgtccgaggttagtgggtactcagtcgcagcagcagggtttccgcgctatggttggggcaccaggttttccacagaccacccagccagctagaggttctagatgtggaggtagaggatttagaggtggagctcagaccgctagaggtggaggccagccagctacaggccgtcccagaaatgtagtccagggtggtggggcccatccctgatgttatgctcttccagccaagcccgaggctgaggctttagatgtagttattacaggtacggttcttgtttgtgatagagatgctttagtgttatttgatccagggtctacgtactcgtatgtgtcatcttattttgcaccgtatctggacatgcctagtgattcattgagtgttcctgtatatgtgtctacaccggtgggtgattctattatggtagatcgagtccatcgctcttttatagttgtgattgagggtcttgagactcgtgtagatctgttgcttctggacatggtcgatttctatgttatattggggatggactggttatcaccttaccacgctatcttagactatcatgccaagactgtgaccttagccttatcgggtttacctcgtttagagtggagaggtactcctagtcattctacccgtaggtttatctcttatgtgaaggcttggcgtatggtcgagaaggggtatttgtcctatttggcatatgttcgtgattctagtgccgaggttccctctattgattctgtacccgttgttcatgagtttcctgaggttttcacttcagacctgccaggtatgacacccgatagggatattgacatttgcattgatttggatctgggcactcagcccgtttctattccgccgtatcgtatggctccgtctgagttgaaagagttgaaggataagttgcaacacctacttgagaagggtttcattagacccttgtttcaccttggggtgcgccggtgttgtttgttaagaagaaggacggattaatgagaatgtatattgattaccggcagttgaacaaggttacaatcaagaataagtatccattgccgaggatcgatgatttgttttatcagcttcagggtgccaaggtgttctcaaagattgatttgagatctggctatcatcagttcaggattagggcatccgatgtccctaagacagctttccacactcggtatgggcattatgagttcttggtcatgtcatttgggttgatcaatgccccaacagcttttatggatttgatgaaccgcgtgtttaggccttatttggactcgtttgtgatagtcttcattgatgatattttgatatattcttgtagctgggaggaccacgagtagcatcttagagtggttcatcagaccttgagggataaccggttatatgctaagttctcgaagtgtgagttctggttgagtttagttgcatttctggcctagaccagcatcagctacacagattcagagtttcttgggattggtaggctaatatcgtcggttcgtggaggggttttcatctatcgcagccccaatgactagattaacctagaagggtgcccaattcagatggttggacgagtgtgaggcgagctttcagaagcccaagacagctctgaatacgacaccagtgttaattttgcccacagattcagggccttatacagtctattgtgatgcatatcgtattgaacttggtgcagtgttgatgcaggatggcaaggtcattgcttatgctttgcggcagttgaagattcatgagaagaactacccggtccatgatttggagttggcagccattgtttacgcattgaaaatttggagacattatctgtatggcgtggcatgtgaggtgttcacggatcacaagagtcttcagtatttgttcaagcaacaggagttgaatttgagacagaggaggtggttagagttgttgaaagattatgatatcactatcttatatcatccgggaaaggccaatgtggtggccgatgcattgagtaggaagtcatccagtatgggcaatcttgcttatattccgggcggtgagagaccgcttgctttggatgttcgggatttggccaatcaattcatgaggttggatgtctctgagcccagccatgtgctagcttgcacagccgcttgttcttctttattggagcgtatccgtaatcggcagtatgatgatccccatttgtgtgttccttagagacggtgcagcatggaggtgccaagcaggttaccttagatgatgatggagttttgagattgtagggacaagtttatgtgcctaatgtggatggactccgagagttgatcttagaggaggcccatagttcccgatagtctattcatccgggcgccgcgaagatgtatcaggatttgcggcagcattattggtggcagagaatgaagaaggatatcattgcatatgtagctcggtgtttgaattgtcagcaggttaagtacgactttggaggatatgctctgagcttgtgtattgactttggaggctcgtgggatcagtttttgcctttagcagagttcgcctacaacaacagctaccagtcgagtatccagatagctccttatgaggctttatatggtaggcagtgccggtctccgatatgatggtttgagccgggagaggctcggttgttgggtacagatcttgttcaggaggccttggacaatgttaggattattcaggataggcttcgtacagctcagtccaggcaaaaaggttatgcagaacgaaaggtttgagatgtggcatttatggtcggtgagcgggtattgctccgagtgtttcctatgaagggagtgatgagatttgggaaaaagggcaagcttagccctaggttcattggtccgtttgagattcccgatcgagtgggagaggtggcttatagacttgcattgctgtcgagcttttcaaccgtgcatctagtgtttcacatgtccatgcttcgtaagtatcacggcgatccatatcacgtgttagacttcaacactattcagttggcagggacttgtcgtatgaggagaagccggtggctattctagacctgcagattcgttagttgagatcgaagagttttccttctgttcatgttcaatggagagatcagcctacggaggcatcgacctgggagtcggagtccgatatgcggagccattatccccatctttttcccgactcaggtacttccttcaggtactgtccgttcgaggaggaacgattattttagaagtggagaatgtgatgacccaaaaggtcataacttgttttaatatgaaacttccatgttctgaggccttgaaaaccttatttagagtcacctcgagttgcatgcgcagtccgggcgcgtagccagacaacttaaatatgataatctgtgaaaaatgataagttttgactgtaaaataaataaat

SEQ ID NO: 74 - DNA, 64981 bp, Nicotiana tabacum
ttaacttttctcacatttcttgctttaaggaagcgtcttcctgaatgaacattccctaaatttctcatgaatctatgtttgttgtccattctattatcgccagaacgcaatatgaaattctcatgatgttgaacattatcaaaccagtccctaattcatgtttattttagcttgttcaccaatccatactgatttctgctactttggggtctaacttttccttctggtattcacgttagggtcacgaatttattttcgaaatgaggatgtgactttatgacttatactcttttgttgcatcaaggtctgtcacctttcgtcttttccttccttgaccatagattcagtaatacttaccgttgtcatccatgtatcacttcttactcataatgcttcattatctctcttcttatttcccgaacatttatgtctatcactttattttaaatacttcaacaagatattcatttgctttgctcccttgctccatccactgactcttcgagttacgtaacattctttatctactaggacgggagccatgctaaggtaatatttatcccttcaaggcttccagtgcctatctttatagtacacaaatctagcttcactattttagagtacaccactaggtatctcacaaggagatctattagcacatttgcaatatccttcaaaaatgtgaataaacaaacattctatccaccattttgggtgctctaacctagtcgaatcctaatatccttccctctcttatacttcttttgttagcctcatagggcataaataagatgagtgtggccaattgtacatactcttgttattgttgaaggtgactctaaatgcttatatttctcttcctaaattgtagataatgctcatctttactaattaggtaccttgtacccttgttcacgttgcttcttttatttgttgaaacttgtatcttctgattctttcattgctttttaccataagagtggatagatgttctttccttagggatcattatcaagaagcttacacctttcagtatacacatgatctgctgaagacctcacatttacttatcataaacatgatacaaagtcaaggtctactggcgcaactcttccatagacatatctcttaccaacaatatttttagatgtaggtatcgttttattatgaataaatagagtttatagtttgaattcttacaaataagctctacaacatgatctagagtaagaagaagagtgacagtcctaaatgcgtcgcctcctgcttataagtgtggtgaacaacacacccataaacaagatgatagattttaaatattcttgccttatgttttgatgatctaacaaacttactgttaagaactagatagggaacctgacctacttagactgctgcaagctttaatagactccagctagaggtgaactgctacagcttgaggagctaggaaccaccaaggactgatgctcttgtggtttcctcatagcagtacagagtcaattggacatagctggaatgaagtgactgacgacactatttttgccacactacactgtcctcccactcattctctaaccaaacaaagtactcacatcatttcaagtgatgtaatcaagatgtaccacaatgagctttatacaaaacatcattggaagtttctgtttcttattcaagcctcttgcaaaaatagagaaatcaatactcacaacttgaagaacaaggttgaacgcaactatggaccagttcctaaaagatagcctgtttgtccttgttgagttgtaaccttgttattatacttattgtatctcctaaactacttactagaagcgtttgattaggaatcctcttgaaaatccgtaaactccttaaatttatgttgtgattagatttagccataaggaaaagtctttgtaattgtagagttacaaagtggctttggtgagagcatcacaagttagaaaaagcctttgtaactaggaagtcacaaagtggcttgtgtaagagtaccacagttagttgagtaaatcctttgcaataggaattattgtaaagtggcttgtaataggtagattacaagttagtgaagttaaaagcctacatgtataggtcgtagtttttttatccccttgtgtgggatttttccacgtaaaaatactctgcctcatttacatactgttttgttagcattctcagtagaatcttgtagagggccaggtactctatagtttggtggacccatacaaactaacaattggtatcagagcaggttcctcatattaggctaacacctaggaaggatcctcatggcaactccaccaaattttgaagaaggtcattccatatacaaacccccaaagtttaatggacaatgttattggtggtggaaagctagaatgcatgatttcattatgactgaggattgtgagctatgggatataatttgcggcggtccttaagttccaatcaagttactagatgaatttccattttcaatggcaaaaaccagcaaagaatacactgaagcagacaagaaagcggtggagaagaatttttgtgccaagaaaattctagtatatggaatgggacctgaagagtacaatagaatctctaccagtgacactgcaaaagaaatatgggaagctttgcaaacaactcatgagggaactacacaagtaaaacagtctgaagataaacctaatactggtggtagttccatgatggtagttgaaggcgaggagattggatatgactcaacttttgctttgatggctcaatcagatgatgatgaagacaatggcaacaaagaggtaaacttcagggatgttaagagaaatctgaaattctattctctaaaaaaacgcatgtgtttaggtgttgttttaatcactgccttttgtagtcttgcggaggatagggattctttgatcttagaattagaagaatcttaacatagtatagaagacttagtggctgcagttactgaccataagaaaaccattgaaatccttagaaaagaaaagagtgatatgttggcaaaaattgcataccaaagggaaacaatagtaaaaccatggactaagtcaaaacttgaaagttctgaaagaggaaaggagatagcaagtgaggaatacattaagcttgaagatgaggtgaaagctataagatttaggatgtgtgctgaaattgagaaaaatgagcttctccaaaccaatctagaaagagtaatgaatgatcttgaaaagtctttaaagtgaacccggtccttagaagctaccactgccttacttaataatgattgtgaaaaaaggctgaatgcagggttccaaagggagaaaatgcgtcacaaccctcacagtaagtatgtcactatctctgataactagcctcgtacccaatgtgggaacactgggcgcttcaagaaaggtgtccaggccaagaatcaatcagttcagaaagacaaagtggctgttgaaaccgtgaccataaaagagggaccaggttccacttacaaaaaaacacacattaactgcatggactaagagagctcttattcatcctcttgcttactacaagggacccaagcttgtttgggttcctaaaactaactcctaatctcttatgcagggaacggtgaaaggaggcggccgtcaatagttcatggatagtgggtgttcgaaacacatgactaggaataccacaaactttctttcactaaaatccctacaatgagggagtgtatcctttggcaatggtaaaaagggtacattcttggagttgaaaaagttgggacgtcactcactcatcctattgaaaatgtgtactatgtcaatggacttaagtatggtctcctgagtgtttcacaaatctgtgataaaggaaacaagatggaattcttgtccaaaatatgtacagtcactgaccttgtgatcgatgaaatagtactggtggccaaaagatacaagaacatctatgttgctaactttgaatatttatagagtggtgatctgagttgtctgaaagttgttgatgatgatgatgaactatggcacataagactaggccatgcaagcttttcctttctgaataaactaattcagaaggacctggtttgtggtctgcctttgtcactaattaagatgcagaaagtctgtgatgtctgtgctagaggaaaacatgtgaagtcatcctttaagtctataagagatgtgagcacctcaaagccgcttgagcttctacatatggatctgtgtggacctatgaggctgcaaagcagaggaggacaaagatacatttttgtaatcatgaatgactattccagattcacatggactctgtttctcagaacaaaagacgaaattattgaagtgtttgtagcttttgtgaagaaaatccaggtgaagatggagtctagagttgtatgcattagatcagatcatgggacagaatttgacaatgtcaaatttgatgaattctgtaatgaaaatggcatcactcacaacttctcagctcccaaaactctccagcaaaatggagtagtataaagaaagaacataactctagaaaaaatggcaagaacaatgctgatttgacagtggaattgcaaagaacttctaggctgaagctgtcaacactgcctgctacttagtgaataggtgcgtgatcagatcacttctaaacaagaccccatatgaattgttgaatggaagaaaacccaagctgattcacctaagaacatttggatgcaaatgttatgttctcaacaatggaaaatatcatcttggtaaattcgatgccaaaagtgacgaaggaatatttcttggttactcctctcaaagcaaggcttacaaaatatataacaagcggactcaatgtgttgaggaaagtatccatgttatttttgatgaatcatatccatcatttgagaagagtgctgagaaagatcaagatggagaacccttacttgttcctggtgaaggcattaacatgacaaacgaaaaagtagatatgatgagtcaagtaaaggagccaaatgaagacaacgctgcctcatcataagcagaaccaagcacttcaattacaaccactgaagctgaaaaaagggtggttgatgcagtttagagaactctctctagcatctgagagaaggatagaggaaaatcagccaaccataccttcctcctctcagaatgaaccttgggcgtctaactggagacaccaaagctctcaccctatagataacatcatcactcctctagattctggagtacaaaccagatcaagagccaaaatttacttgccttctcagcctttctctcccagatagaacccaaaaatatcaaggaaaccttgaaagatgcagattggattacagccatgcaagacgagttgcattagtttgagagaaacaatgtgtagcacctggtacctagaaccccagatcaaaccattataggaaccaggtgggtattcagaaacaagctcgatgaacatggagttaccacaaggaacaaggccaggctagtagtccaaggctacaatcaagaggaaggggttgaatatgataaaacgttttctccagtggctcgcatgggatttatcagaattctaatcgcttttgcatctcatacaatattcaccttgttccaaatagatatcaagagtgcatttttgaatgaactccttaaggatgaagtctatgtgaagcaacccttagggtttgaatgtcacgagcaccctgaatatgtgttcaaactggacaaagctttgtatgggctaaagcaggctcctcgagcttggtatgaaagactgtcaaagttcctcttagaaaatggttttaaaagaggaaaaattgacaacactattttcttaaaaaaacgaggaaggaacctgctcatcgttcaggtttatgttgatgatatcatttttggagcaacaactgactctctatgtgaagaaattgcaaaacttatgggaagtgaattttaaatgcgcatgatgggagaattaaacctcttcttgggtcttcgagtaaaaaagtccccaaacggtacttctatttgttagcaaaaatacatcagggaactcttaaagaggtttaacatggaagcatcaaaggtgatagacactcccattgcaactgccactcgactagacatggatgaaactggatctcctctgaatcaaacaatgtatagaggttatcttgtgatgcaaactatgcaggttatcttgtggacagaaaaagcacttctggaatggctcacttcttaggttcatgtcttatctcttggggaacaaggaagtagaattcagtggctctgtcaacagctgaagctgaatatgtagctacagcatcctgttgtgctcaacttctatggatcaaaaagcaactggaggattttggggtactcactgagagtgtgccccttctatgtgacaacaccagtgcactcgatatggccaagaatctagttcaacataaaaggacaaaacatattgatgtgaggcatcattttctgagagataacgtggagaaagggttgatatgtatgaagttatgtagcacaaaagatcaaattgtagacattttcaccaaggcactaagtagggaacagtttgaaagaaacatagtaaagctgggactgttgaagccaaattaagaacctgtttcctctttggttggcacctatccttaagaaataactggctcaaagtgttttctggccatgtctaactcacttcaataccgttgcaggtaaacacacatgatgagcatagaggaaatagatgcaatgcaagattgatgaaagaggattgatttctttcaaaacaaaaaaaaagagaagaattttttttcaagaactaggttcttgtactaaaggttagtagttctatgcatccttttaatacacgtctaagggtacaaaatacaactgccatgtcatcaactttttagatcttgctgtcacgtcctttcaattcaaaatgttccatctccctctgaaacattgcaattctccatgcccaaccaccgtttcagaacaagtgcttattcctttccctttataattatcctctccttttaaaacccctctcttctgctcttcttaaccataagtcctacactagaatcacccaaaagggaaggatcctaacaccacttctttcaatggctgaaaaaacttccgatctctttgcctctatggagatgagcaggttctacaccactgacccatatatggaacctttcattttgactgagccttcctcaccctctaccactcttgctgctgcagtcacaccttccccaatttcccaatatcttcccaactcagaaacctttaaaactactattttgttctccccatcgtctgttgttcccaccaatcaaaccctaagtggagaacaaggtcaaaatactgagttcacaagggttctgaaatcgttgccaccgatttcatggttttggaagcaccggttgaagaaaagaaagatgttgtaactatgtttgtagtatccactgatggggtattgcatgaaattacatcccaaaaaaatgagatacacgatgtggaggaataaggggccattgtggctattgaagggtatgcaatagcagatactactggggcatcacatgaggaacctgatccctctccggaggacccaggttagggctctcatccctaggacagtactattcctgcatttgatgttgtgcccctgggaattcaagcacctgaaatacgatctagtgatgaataagacctggataatgtggctcttgatgcattcataagtaagcgaagggttgcgtccacccttgagtctgaaatcaaacgacctactaccacgcttcaagtcaaagtggcctacgactctactctccaaacgagcaagaagagtagtaagaaaaaaaaagaaaaaagttggtgaaggatggtgtacctgtaagtgatgaggctatccttgtagtcgaggtggaagagggaactccagaggaacccggttcacttgttaggcgatctttgaaaaagacaaagcctgtgtcaatagagaaagggtcaacatctaagtccaaaaagaaggaggtagtgagtgagttttctatgtctgatgaggatgtactagttaagtctaaggcaaaaggcaaagtcagtggagagaagtttgggaaacgcaagtcggaatcttttgacgaacctagttctatgaagaaaatgagaagtgaagtcagccttggctctgagcttttgaggcatcaaaaagttctattgggtcgtatgtttgacccaacaatctctgatatggctggaatgcgccaaattctggaaatggtcgagtttcaacgttgggtgcatctatttcacatggatgcacctaaggtgtatgaggaggaggtacaaagtttctttgctagcctctttccagttgatactgaccatgtctatgctttggtcaatggggtggacatcgtgtttgatgtaaaattgcttggagagattttaaaagttcctacagttagggtgttgagtgtacgagatgtttgtcagtataacttcagaaatgcaatggtgaaagaaaatgctaatcagaaaggggactagatccataagaaagcactactccctgtttaccagttgttatttaaattggttaacaaagtcatgttgcctcgagccgaaaggaggttagtgacttctaagtctgacctattcctaatggagcaacttgacggtttcaatcctatgattcttcctgctattatgatcgaacacatgcaaaaggtttccaccttcaaggacggtaatcatggacttccctatggattctttcttactccagtgttcaaattctttaaagttccactgggaataggtaaagtggggtctcgaaagcggacattctcatagacaactttggaagagtgtgagtgtgtggaaaagtattgggggggaggagtaggaaatacatcaaccgtttctcagcttatcaacgtccaaaacagtgcagctgaggaaattcatcggttgaaggccatgaatgttatcctggaagatcagcaagcccaaggggttcccatgtcgaatgatgaagtggcttgtttgacacaggagaatgctaatctcagggcgcaagttgagaacttgaaggcggaactgctcaacgagcaaaagtcggcaaacaccttaatagacctcgttctccaggcattttctgctgctaccaatccttttactcctagtgccctaaagtacccctttagtgaccagttttctggatatgtttcttatgtttttgtttcattgttgatggtttggcggatgtttttttgttttctttttttgatggttgggaggaaacattactactcccgttagcaagtccaaatgttgcctctagcctttttcataggcagaggtatattaaatcgttattaatattaattctagttttattatgtcagtactctatgtgttctattctctatcatgattgtgtgcacatatgtggcatgagttagcttcactggacttctttgtgctgttatttttttaatgatgccaaaagaaggaaaaaaataataatcagggggaacacacatggaggaactagttcttactactctgatcatgtaaaagataaggcatagtcttagggggaactctctgtgttccctgatactttaaaactggtactgccctaattccagtttataaatgttaagtttgtcatcatcaaaaaggggaaattgatatattttaaatactcttgccttatgttttgataatctaacaaacttactgttaagaactagatagggaacctgacctacttggattgctgcaagctttaacgtattccagctaaaggtgaactgctacagcttcaggagctagaaacccacacaaggacctgatgctcttgtggtttcgtcatagctgtacagagtcaattggacacaactagaaatgaagtgactggcgtcactgtttctgccgtactgcactgtcctcccactcattctctaacaaaacaaagtactcacatcatttcaagtgatgtgatcaagatgtacccacaatgaggtttatacaaaacaacactggaaggtttctgtttctcattcaagcctcttgcaaaaatagagaaatcaatccttacaagcttgaagaataaggttgaacgcaactacggaccatttcctaaaagatagcttgttgttgtcctagttgagttgtaaccttgttactatacttattttatctcctaaactgcttacctagaagcatttgattaggaatcctcttgaaaatccataaactccttgagtttatgttgtgactagatttagttataaggaaaagtcattgtaattgtagagttacaaagtggcttgtggtgagagcatcacaagttagaaaaagactttgttactaggaagtcacaaagtgatttgtggtaagagtaccacaagttatttgagtaaatcctttacaacaggaattattgtaaagtggcttataataggtagattacaagttagtgaagttaaaagcctacatgtgtaagtcgtagtttttttgatctccatgtgtgggattttttcacgtaaaaatcctctacctcatttacatactattttattagcattctcagcagaatcttgtagaggaccaggtactgtatagttcagtggacctacacaaacaaacacaagactctactagacatggcttgtagactccataggacagaactgctttgataccacttcggtcacaccccgaacctggggggcgaggtgcctcacctatccttgtgtacaaacttgcgactaagggactttgaacatataatgtcatactttggccatgggccacattgcaagacaatttgcaaatgctaactaaacatcaacataatgttgggccgacaaaactatcataactactacagctggaaaaccaatcaaaatatacatacaaggcctacaagcccaatataccacactaactgacaggatatatgtacaggcctctactgatggatatactatgatcataatagggccccgagctactcataacatatatacatatatacacaagatgtacgtaaagctctagacccgacaactctaaagggcatggagcttaccgatcaagttaaacttgggcaacacctaatggggatgtctacctctctgtctgtttgaacctgcacgcatgaaatgcagtgctcccaaaaaagggacgtcagtacgaaataatgtaccgagtatgtaaggcaatattatgaaagctgaaactgaattgataatataataacttaaagtaactgggagtcaaagataatctgaagatatgctcacctgctgatactggctcaactctctcaatatagtaagtaaaatagctatccgaccttataaggtttggcatatatatagctgctctgccgtagtaggctcgctcataggtgctcaaccatactaggatctgtatctcggccaactaggctcgctcatagccgctcagccgcagtaggatcggtatataacttaccatctgattagaggttgcccaatagaggtctgtccaccgattatatgtaataacccggctagtcgtattgagaattaacgcccgctcccatattaactgctttcaccgtgttttcatctatttttatttgtcgggatgtttggttttgagtttcgaagtatttttaggacacttaatccctaaatgagagtttaagttctagaaattagatcgtagtcagatcagtgtgtagacggcctcagaatagaatttcattggttccgttagctccgttgagtgatttaggacttaggggcgtgttcggattatgttttggaggtccgtagcctcattaggcttgaaatgccgaatgttgaatttttgaagttttcggtttgatagtgagattttgatatcatggtcggaatgaaatttcggaagttggagtagctccatagtgttggatgtgacgtgtgtgtagaatttcaggtcattcggacgaggtttgatagagtttttgatcaaaagcataaattgagagtttctgaagttcttaggcttgaatctatggttaattggttgattcgatgttgtttgaggtgttttgaagttttgtataagtttggatagtggtatataacttgttcgtgcttttggttgaagtcccgggggcctcggggtggtttcagatggttaacggggggttttttagtttggtttggcagctgaagtttttccattgctgtcataaccgcacctgcgactaggggaccgcaggtgtggactcgaagaagagagcatagagacgcagatgtggccacaagtgaaggcagcagataccgcagaagcggaagggttaccatacctgcgggaccgcagatacggaatatgggtcgcaagtgcggagatggaggttttagtgaaaacagcagaagcagttccctcaatcgtagaagcggtagcgcagaagcgggaattttgactacacatgcggatttactaggcagaaaataagaatttcaagggtttagtttcaaaagttgggacaccgatttggatcttgggagatggcgattttcagaggattttgaagaagaaataagtgggtaacgattcctaatccctttctagttgtattcctataatctaatcttagatttgtcatttaatttcggatttgggatgaaaattgggggaaaatttggagaaagttcttagacataaatttcaagttttggtatggttagactcgtgagagtatgaggattctgaaaataaaatttttatccgattccgagatgtgagcccgagggggcgttttggtcattttatctaattttgcatattagcttagaatttgtttataaaatcagttatttgaagtcttatttatattatgcaattgaattgaatagatttgggccatttggagtcaagtacttgtggcaagaacctggtttcgggttgattttgagcttgttcgaggtaagtggcttgcctaactttgtggggggggggggaactccccttaatatttggtattattgatatttgaaattccttgcacgtgaggtgaagagtgcgtacttgtgctaatcgttgaaaatcttgttttcactaagtaactttaattgtgttttcccttcttgtttattctacttgcaatcaagcatgctgttagcttagagaatcatgtctaattgccttaattgtttttattttctcaaactgccttatttggactatgtgaagcatgttatgttagaaatacttgttaccttggtgtgaaattgaatttaattgagtattcttcgtgttgttactgcgtgtttactttaggactacaggacggtatcccgggagatcccctacacatatatatcgatttggactgtagtgcgggataccaagagatccccaatacatattgaggatactaagagatccttgggataccgagagatccccaacatacatattgaggatactcaaagatcctcgggatactaagagatccctggcacacatattgaagatactaagagatcctcgggatactgagagatccctggatgttatctctgtgttgagttgtactctttttcgtgattattttgtctctgttatagttgttgttgttctttctattttatgttatttcttactgttgcacttaatttttactgtcttattctatactgtcataccttatatttcatttaatctcaatagggccttgactttcctcgtcactacccgatcgaggttaggcttggcacttactgagtaccgttatggtgtacgcatgccctttctgcgcatgtttttcatgtgcagatccaggtatttccactcagtcttatcacactttaggcgaggtgctgttgtagacactccaaggtatatctgctgtgtccgcagaccgaagagtccctttctattctcagtactagtatagcccttctgtattttccttgttgatagacatttctggacttagagctttttatgtaatctcttagcttgtgattcatggggttctagattttgggagtgttaggttgagattcttgtactgttatatgccgaacggcaccttaaacactgtttcactttgttatctcggtttttaattattttctttccacaattgtttcttttctacatttgttaggcttacctagtcatagagactaggtgccgtcacgatagttcacggagggagaactgggatcgtgacattataactcaacgataatgaaaatactgtaatactgtatctataggctctctactctcttgactggaaaaagacaatactcaatagaatatgaagtcccaataaggtagaatactgtaacttatgagactaggataatgtatataaattcgggagcatgaacttctctttatgcctctttatcaaccatatgtaataatgagatcatgtcaaaatgaaggaagggcttagctttaacataccttatctgattctattgacaattcctccaacacacgttgattgtaaagaaacacgtaatggcgagatcaaaataggaaacaatccgtatgaaatgctcaaagccaaaacgttgctattgcaaaattatttttgttgaaactctttctcaagatatttagaattaacgttatgtaatggaaagtttggctaaaattcttcttaagagattagaaaatattgttcaattatgaatgttatctttaatttttgggtaggccccacattccaagcttggtgtcactttcctttctcaaagtgtgacacctttccaccttcagtaatagtcattagatagataaagaaggcttaccaagttgggggggggggaggggtctaagtcttatcccaagattaataattaattacccactaattttaattaacttgcaaattctccccattaaccaataatccacataattaagatttatctcaaattacttagattgatactcacttttaacacaccttatgcaccttactatcacggtcatatggtaacttagatggtattaatccataagtaccggttattttagctcggcccgtattttattccaaaatatcaaactttgacgaaaatttattttcttcgatttgcttgccctctcatcttcacaaatttatccatcacttgtttgaaatagcttaatgcttataatcaccaaagaatcttgtccttaaactgaggtcaattatcttatgataatttcatgtataatactaaagggtgtaacatcgtcttcatataatattacaggtcctaatatcgacataatactgcggggagtaataaccacgatttactacccagtaggattttctccaaacacttcaccacaactctgagccaaccacaaagtttacaaactcttgcaaacctaaggattaactctaacccttatagcaaccagccacaggctgttgcgactacttcaaattaactctaacttgaaagatacaactcaggtacctagtataatttgcttcttagaaaactgaaaggtataacttaaaacgcctactacactttgaactagaaataaagaaagacatataaaactctttatggagctggttcttcaatctggttcgtgtagcatcaagatcgcactcataaatctcacaggaattgctcacaaaatgccttgctattttgctctcaatttgtgctttttacttaagtatgtgtgtatcacctgtaaaagaaaacaacactaatatttatagaattagtaaataaagattaactagagttctaatactttactcttccttggtaaaagagttctagtcaacttcaacttataattcttctcttatcttggatagagttctcttcaagtaaggagtcctgctccttatcaaatatgcaaccttttcgttcaaggaatattagatataaccacttatacttatctctttcaagtgcaagccttttgctttatttaatccatcacatgtgtacactgtccttggacctgattcatgcatgtgttcctttgtcaatcatcaaaacaaacttactcaagctagcactttgattggatctgtggttttagttccggtgtcaattatgatgagccatttcagatttggtgcccattatgacaaccatttcggaatcggtgcctcaatctctatatgtagggatggccaaacctgaatttgaatcttttattcttccaaactttgagacttaaaacatccttttggaacctctattttatgcattgtttccttctttcgcatcctaaactctctttccagtatccgtctttactttctcataaagatgtcaaatgtatcatctgatgttgatgaagggagccacattgttccgttggtggttgtgttccctaatcaaggggagaatgcagctaccaccataaagaatgaaacttttccctcggtggaggatatcatctcccgcagccccgaaggcaggtctgatttccaacgttcgccggacgcggtgcttggaaaatccctcctcatgttatctctttattctttcctaggttcagtttgtatcaagatgagtcatcgagttggtccattgatgtcgtcatcatatgctcggactacagcacaataggtattatggatttcatcccaagtcgttggaggatacttcatcaattggctcagcagctatcttgtcgctcttgaaccctatctactcaacccattcttaaaggctgtgactataatcccttcggatacatttggtaaggtcatccttaccctgttgaatcgggtaaggaagtccctcagtccctctcctaaggattgcttgatggagaagatgttgtttactctcgtttcgattttcttggccccaacatgtgccatcacaaacttgtcagccattttttcgaacgtttttatggagcaggctggtagccgtgaataccatgttaatacccctctagggagggtttcactgaatttcttcaacaaagtggaggacacttgttccttggtgaggtcgttgccctttatggcggtgacgtaatgagtcacatggttttcgaggtcggttgtcctatcgtatattagagatacagtggcattttgaaggtatttggtatggcatgtagggcctcttcctcgctatggctactctacaaacctaccgacgtccctttttggcggtaacttaggggcacccgatatcttgtctactcgctccccatgttccttcatttggtctgtgagcgtcttattttcattctccatttcttccattcttttcaaaatagcggcgaggacgttgtcatctgcactgtcagtaacattgtgtgttatacctagagttggagggtctggttgatcgccatgttcgtcccctcgttgtaccatgtgggctcttgtgatttctatggtcgtgcatggagcttgttttttgagcacgcttactagggtatcagttagtcatgcttcgaggggttttttcattgcaggtggcttcctttctcccgtatacatggaagatccttttctgtttagcctcattgtgttgcaataaggggagatgacttctcacgcctaggggaggcagtgggcgtcatatcctcgcactgtatttcatagctctcgttgatggagctcatgaggttactggtatgtcccatgtcgccctagtcccttttccttggttactttccagggaaatgtttgtgcatgcagagaggagaaaaaatttgtggcctcttaggttagaaagtcacttgagttttagacttaatagaaactaaaagattagctaagaaatccccacagacgacgccaaacgttttgaccaaaatttagatcaagtttaaacaattagattttttaacaaggtggggttaatgttagccaataataatatcccttagaatgtttaactagtgtcgtgataaaatgttacaagatatgtggtaacagtgataaatatataataatgaacaacacttaatggcacaaatatgaagtgaataacattcagtagcaataaatgatgtataatggtatttatgtaaatatatgtgacagaggtgaccgaaaaagggaatgaagctgtctaatattccttccgacaatgataaatgattgataagcctttgaatattcatattttccttggatcgtgggaaaaaatctaggcagggatctcaagaaaaaggtatcttttatatatatgtaataaagaaaaaatctcaaagaatatcaaagtgttgttgttttacaaatgggtgttcattatcccctataactatgtctctttctatttataagggtacatgtgccacaaaaccctaatagtacagatccagaaaatattctgtgaaatattctttttaaagtcttatcctaaaactagccattattactctgtttaaggagagtgtttgtcctcgaccttgatctctgttaacccctcgatctagcccttcatctcttgtcatatgacttcgaccttgaatctgttttttcttaaagttacattggtaatacgtggcagccctcgaaggccctatttatactgacgtggtctaaatactgttgacattcaattttttcctatatattttcaatatgaaaaataacttcaaaatgacatatatatgcatatgtaagcatatccaagtgttttattattttttcataatttttaaaggtttttaaatcaatttatttccctcttttatccataaaaaaactaataattgtttccaaaatattattttggtaattcatttgttggaattttatatttatactatgatatagctaaggtaacttttgcatattgttttacaaatttatttagtatttttaagctaaattgcatataattgcaatattggcccttttaagattcaattgtgttttatattcataaaattaagccctgtatttttaaattgttaattatatgttataaatcattttagtgctctcaatttattttcagaaattaatttactattttttataattttaaaagtggaaaattggctatttcaataatagccgagttacatttcaattttagcctatatctgaccccaaattaaacccaatttctccggaccaattcccattcaaacccgacccctaacccaattaaaaaacccaacccggattcccccacctaccattttgaatccaggccgttgatcactcagatcaactgccaccattcgcccttccataattaaatccaaaagaccccttaccctacctcattcttcaccaaacgctgcccttgaatccttcttctctcaactctctctgcaatccctcatgaaccctagccgccgccatctaatcccaccctaatccacttcaacccctgccgaatcaatagcctctcatggccatttgagatgtgtattagcctcctgtggctcctaggtgtttgtttctgtggtttcatggttagacctcgagtgaatctggtccagtccttgctcaatttctgtttatggcctttctccggccatccatgacctttctccggtcattcatggcctttcaaggtagatccttgactttcctagttagatcggtaactttcaaggtctttctcagcttttctggattttttgaaaccctaatctttaagatctttcagttttcttcagatctaccttagatctgttatgaatttcttaagtgttttctcgaaggttcttcaatttttctttcaaaatgacttttcattttttcgataagggtttctcttaacctctcttttaaagatctcttctctgattttggtgttgtttcatgattttgctatgttacctgtttatgctttccttctacttgagtcagcatgttcaaaaccctagttcttttagtcttatccgagttctgaaattatttgcttaaatgtgtgcttatcttaagttcttcgtttatgactctcttttccttgttagacttgtctgatttgagttcttttcatttgttaaactcgactactgttgaagccctaaatttcttagaagtttttctcacatacttgtttccgatttctcttacctgatactatgttcttcttcactgttgattttatgtgactactagacctacttgactactgtacttcgaatattttttcttactactgaatcctagattatttttgccactactatatgtttgtattatctattttgccaatgtatttggcctcgcatggctgatgcttctattcactctatttatatacttaagtgtagaaccatgtttatcctttgattggtcttgaccttttgactgattgcaaaggcttttcttttatgatttctttccttaaataaacttgctattacacgtcaaatagtgattccttaattaaagggaactacctatgttaattgattctgatctaattgtttccatgtttgtgttaagactttacttattaccttacttttcactcattttcaaaaactataaacactcttcacccaagaacacacacttacactcaaaacattgtctcttttctttactgctacttgtgctacttctttgtctagccgcatgaaagtccaaggctagactgtagaatcttgcttatttctttctttctgcactttgtttctctactggtatgtcctagttaattttcaagcatcaacaacaacatgtttctttagttgtcttagttcctttcactcttgcctacttctgcttatgtttatgcaatcaagttacattactagcatgttgtaatatgctccctccccttttaaattaatgtttcccttatgtatgtactctgtcagtcacttgttatgtgatttgatgacttatgaatcccaaaaccccatatcccctgtatgtgtttgtgttctctggctggtttgtgggtatgccagcattatctattgttgtgcatgaatcaaacctgaccctttctggggtcatatgcttcatacaatgtattcccaaaacccccttgacccctttgtgtaattacttattctgttcagtttgagctttactactactattttcaaatcacccttaccacttgctagttcccaacccagttttaaataaatctctttcaactatgttctgcacttccactataatcttataaccttggttctacccctcttgtttgagccttgacttggaaaccttgagctccctctgaacttggacacataagggctagcccttccacactgcactcatctatgtctggttatgcaacctgagtgtaagcactgcccggggtcccttgagacccttagggaactttgacaaacccaggtctgagaaaagctttgataacattggcttttgaggtagtttattccataactcagagaggaagtcaagaatcaggcttcctatggttgtaactccttgtttttgcacttttctgatgtaactcatgcatttttggtctataataatttgtaacaaatattggagggctggctagtaaaaagggatggggtgattatgcatgatttagctattagaagggtatataacatgcctataggatctgtttaataaattttgcatgttttacttccacacttagacatcatgcctacaaggttaaaataagctttgaaattagatgtcatgcctataaaattaaaatcaatatttttataaaagtcatgactataggaatttcgttgtgatcaaataaatcctgcatgtttcacttcacattcaactagataccatgcctataggacccaaatcagccattaatatttagataccatgctggtaggaattaaaatcagtgataatagagatcatgtctataggatctgagaccagtttagtaaaaaatcagtttgactcatactgttcaaaatcattttgaacaacctattcctttcattaatgcggtttagaaagcatgcctataggatccaaatcgcctgtttaaaaattaaccactgctctattacctttttaatcagtaatagatatcatgcttataggacattaccaatacacacttaggcaagcctcaggtattaatgataaaactgaatccgcctttgtttaattaacaactgctacaactagcaggcaggcatgattggggcttcttatctgagttatgtaataaattggtctacttcaacaattaaaatgccgtgccttagtactttaaattctgactctaactgtgtttaagtcatgctatttatgtgcatttttgcagaggtatatataagcctcttatttgtttatatgtttcctctaatatgcagttctacttgttttgtatatcgccttagcctttttacctttaaaacccaagagtcagcctaaaatcctccctcttataggaatagtagtgctaaattcctccgtgactaataggaatgggatggggaggccgagaccaatccgcactttaataccttaactggatgggaagggtagatgtggatatgatgatcggtgcgctaataccacgtgtatcccctcttccgatgagtgtcatacctggtatcgcattgatgtgatccatataataaataaacctaggaccccccctccttttacattctcaagtatttgtaaaatgtaactccttttcaaaattcaccttttaacagttgtttttcaaactcttatgtgtttaaacttaaatcccctactatttgagcctatatttgtctgtttgctaattgtacaaaattcacaaaactgtctggccaggaaccacactagtggatcctgaggggcgcctaacaccttccccttaagataatttcaagcccttaccctatctatgttatcaaacaaacttagaaataaaccctataggtgtcctaatacaccttaaatcattaggtggcgacccttcaaatgcaaacccagttcccaaaaggaatgagttgtcctaccccaaaaatgtcataaacccgattttccgatgcaaagaggaaaaaagggggcgcaatagcatggcgactctgctggggatttttagggttttaccattttggattgttcttgtgaatttgtacctctttatgtgcaattacttgtttaattactttaagcatttaatatccttttcaactgcaaaactgacatgtcttcctgtttctttcctttattgctgctttaaattatgaaactgttgtatttatcgcttttttaacgtgcaaatatgtgccaacatgttttaattattgcataatcatgctcaacatcatactccactcgtgccaaacaaatactatagcaacgcttataatgagtggttgcgctcttcctatatcattaccccctaaattcgtaaaggcgtatttgcgataaaaccattcgattagcggtgtagtcgacggttccgtgccttcccccttgagttgtccgctcaagggtactagtctaaaaccccatagaaaccattactctattcaaattgtgcatgcatcatggtcaaacctagtcaggccagctatgttatccatataatgatcctttaagatggccttgaccaaagtccactgggtttccctaagcctaaacggacatcgtcacgttctgtgcatttatttggagaactaaatgatgcatgctaattgttggtattaaatagtcaagtctggtgggggtaagggcctaaccttttctgtcttgcagaaatatgaggcatgaagtccctagatttagcatggtcaccatcatccacataagactgctaatctggtggaaagatcatcactctagtgatcaaactctcgtccgaaaatatctaggaaatctaccaccccttttggagatccaacctaacaacaagatcatagaagctgccacactgttttgggattatcaagggctgtattccactttggggacattgaaatgacacccttgctagaggatataggaggattggccggtctagtatgggaaactccgggtctactgatgcttgagaaccgtaaaggcaggggtttcctaaaaatgataggtttgaagaagaatctagaattgacatgtctgaaggaattctacatcccttgtgattatttgttagaaaggtacggtcacagcaaatcctaccatacctaccttgacgagttcgccatcacatccttggggcacattcatcgtagggttttcgtcttcatgttttgtttcctgggtctgatcatgtttccgatgaagaaagcaagaatccatactaggttggctatggtaactaagaccctaatggaaggaattggtgggcagccattcaacatcgtgcccatgatcattgaagacatatatcgagccttggacaactatcaacgaggagcaaaacactttgaagccagaaatttattacttcaactatggctcatggaacatctccaaaggggagaataccaacaagtgattcagcaaagggactgggatgatcacatcgctttccatcatccaaagcgaatgaattacatccccaatatgtttgctcagtcggaggatgccaaaggatgggttgagctatttgatattctgactgaggaatgggtccaatggttgttcgagtagttttcaaccgaggagttgatcgctcgatctagagatgcacctttcctgatactgatcagtctgagcggaacatacccttacgtccctctccgagttatgaggcaagctggtaggaagcaggttataccaagggtcgacaagatgagtcattttcgggatgacttcaagaatgatgatagtccttacaagtgccaagatcagtatatgtggcactacaagatcataatggggagagataccatcgagccagacaggtatcatgctagttgcgctcctttctactctggttggttggaagacaatcatgatggtctgggccagctagggtttgctcaaggtcacaggattatagatgaaagtgctgaggcataggtcaaatacaaccaactaagcaaaaggatccggagtacgaaagcgaacaccgcgagatacaagagtccaaccagaagctgattgaggaatggaaggacatggctgtcagtgccaacaagcgactaggatacttggagcgaggtatagtggagttgagagaaagtttctcaaaagggacgaagattgtcaaaatgcgaaagggaccgaaggcggacacctaaccagagtatacctgttgctgggacttcgcgagttggggaagctgttagacggagccaaggatgctgaatctggggaaggtctttctgggaccaagtagataggagtttatctttttgctttataaatgtaataaggcccatggccattagtgacttttatttcctgtttatttatcaatttgggattcgtctactttttatcaataaaatgaggcatttagcatcctaagttctccaaataaatttgtcgctaggcctacctcgggcacaaagaggtccccaaattaggacgcgctttacattcccgcactatgtgtttaaatattgcaatacttcctatattcttcaataatttgattaccttttgtttttattttttgtttttattattcccctccccaaaggttagttcatgcactctggaaacatcatcctattccacgagatccaggggccctccacccactcctcctcttagttctgtcaaaaacaagaataaaggcaagatggaagatttgaacaacgtcagaaaggagaatccaactgaacgggtagaggccactaatggccatggtacttaggtttatctggagaatgtatcccagcttgaacaaaagttgttgaaattccaagaagagctagatcaggttcggaatctggcaagcctctcattttccctcagcaccccaaatatcaactttcccaatactcaaaaccctacacctcctcaaaacatcccaaagaaacagaatcatcccgctcctcaccatcacactattccaccaaagacccaatgcaacacctaccatacaccaaacaatactccagtactcatcccagaaccccaaaactccacaaatgaccattttcacacccctatctacgtgtagaccatgccgcactccacccaacctatctcaagcacacccgagtctgatgaaaaagacatgctcatcagaaacctagctgaggaacttaagaaattgactagccggattcagggcattaaaggaagtaaaggaattgaggggctaaactatgaagatctttgcatatagcccgatgtcgaactacccaaggggtacaaacatccaaaattcaaaatgtttgatgatacagtggatataaggatccatttgagaacatactgtgacaagatggttagagtagggaaagacaagagaatccgcatgaagttgttcatgagaagtttgaaaggagatgtgttgtcctggtacatcagccaagatccaaagaagtggtcaatctgggtaggcatgacattcgattttatgtacaggtttaggtttaacacaaaaaatgtgcggatgtgttctatattcagaatctaaagaagaagcctacagaaacatttcgcgggtatgctactcgctggaggtctgaagctgctaaggtcaaacctgccttagaagaggaacatatgaacaaattctttgtccggactcaagacccgcagtattatgaatgattgatgatgatcgagagtcacaaattctccgacattatcaaactgggtgaaagaattgaagagggtatcaaaaacgaaatggttacaaacttcaaggccttgcaaacttcaaataaggccttgcagtctggtggtgcatccaagaaaagggacgtagggtccgtgatggttgcacaaaggaaaaaatctcccctcaaataacaaacttacccaacacctccactcatatatcagccaactccaaactaccaagcaccctcaccaccaacttatcaatcacctctacctctcacatatcaacctacttcaaccagatacttcgaacccgctcatgtctaccaaacctacaatgctccaccatcccactatcaatcacctcctacacgccaaaacttccctagacctcgacctaattttgatcgcagtcctccaaaacaatatacagccattgccaaacccattgaccaattgtacgagagattcaaagctgctagttatgtcacctccatctctgctgcaacccctgagaacccttctgagtgggttacccaaacaaatcctgtgcataccactccggcatgaaatggcacaccatcgatgaatgtcgttccctgaaagacaagatccagtctttaattgataacaagattattatggcaaaggaacctgctccaaatgtccacaacaaccctatgccagaccataagggtagaggtatccacatgattgaaatagaggatgattaggatctcgatggatctatcgggttgatcatagaatgtgatgacccaaagaagctaacagtcactctcaatccaatcatagtctagatacaaccgtctgaggatgctgaggtagacttgtctgtaccacttgaatttgaattaacttcatccgcaaagacaccaacactaattgaggttgaattcgtgtctccgtaaaatgcacccacaatatttgaggttacagttttactacccgaggcatatgctccattcggagtgaggttagccgtgccaatcccagtagcaatgccaaccatgacaccattccatacaaaggttgtatcttgggattatacagccgaggcgaggaggaaaggcaaggtcaggttcgaagagaccgttgcagcacagggtatgacaagaactggtagagtctatacccctgaacatctagctgagttaagaaagcaggcctctaataggccgcccaattgagatgggtccagacgatctttggaggaaaatacaggccaaagaatactcggccattgaccagttgaacaaaacaccagcgcaaatatccattcttgctttgctacaaaattctgaggcacacaagaatgctctgctaaaggtgctgagtgaagcatgtaccaagcaacatcactggggggaaatggctaacatggtaggacaagtgttggagagccataagatcacctttcatgaggacgagctgccacctgaagggttggggaacaacaaggcgttgcacatcactgtgcaatgcaaagactattttatcaccagaatcctgatcgatggaggttctagtctcaacatttgtccactggtaatactcaagaagttgggtaagggactacacgagatataagatggagctatcaatgtgaaagccttcgatggttcctagagatccaccatttgtgagattgtcctatgcttgcaaatgggaccaacatggttcgatgttaatttccaggtgatagacgtgccagcatcttacaatctgctattggggcggccatggattgatgttgctggggccgtagcgtcagcattgcatcaggcagtaaaattcgaatggaaacactaggaggtgatcattcacggcgacagtagcaaccctatatacagtctccagaccattccggcaatcgaaggaagaagaaagctaagtggagagacttaccaccacattgaacgggaaaatgttgttgacaaagataaatggtgggataacaaaatcgagagtatactgaattggagtgggtacgaacctggcaagggtctcggcaagaacctccaagaaatcaccaagcccatacaactcaagaagcatggcactaccttcggtttgggatatgactacacttgggaagaattcaacaactggtcgccaccatggcgcagtccttactatccactagagcagccaatactggatctagagaagattttccaacaggctgacattgtttatgggtcagacgaataagaagcactttcagcggtgaagagcttattcctagaagacaatgacatggactattgtgttgttctcaaggaggagggggaggaaggcccttccatacaagctatgagcagagaggcacgcctcaataattggaccattaggacaaccagaacctaacgagcctcggggtggcaaggctaaaacaagcatcattctctgttttatttattaaatgattttcttttcgcatttttcaattcccgcaataaaaccttcaatgttcaaaacaattatgcaatttatcaaagcattttgattttttctcataaatcaacactcattatcattttctcccattactttacttatacaacattactattacttatcttgatgaaccaataactgtgacatgtaatgagacaacgcaacaaatggacaatgattcagaggaagatgacataccagatgagattgtcaaagaaattgagaactttaagaatagacctaagtccaacctggatgagaccgaaattgttaacttgggagatgtagaaaatgtcaaggaaacacgaatcaacgttcacctatcgccattagaaaaggaagaatacacagaatttctaaaggaatacaaggacatattcgtcaggtcgtatgatgacatgactgttctgagtacgtctattatgtctcacaaacttccaaccgatccaacgtgtccaccggtaaagcaaaagctcaaaaagttcatacctgatacgagtccgaaaatcaagaaagaagtcaccaagcaggtcaaagctaaggttctcagggtagtagagtacccgacatggttagccaatatagtaccagtgccaaagaaggatgggaaggtcagagtttgtgtcgactaccgggatctcaactgggcgagtccaaaagacgacttccctttgccaaatatacacatcctgattgacaattgcaccaagcatgagttacagtcatttgtggattacttcgctggttatcatcagatctagatggatgttgtagaaatggacggagaagaagtttggccaaagtcgatcaattcagatgcagtcaagcattactgtgtgtaatcattatgcttccttatatgatgtaaattgaactacacctgacctgtttcctgtttaagaggggatacataggcaaccctatgggttcggtcacaattcaataaaattttcatttcccaccacaattagaagttggggcagaattttaaggaggaccctcaaaattctgaagtaatttcagccgatcaccacatgagcaacagtcagaaacataaacctgttaaactaaggtagaattttgagaaggaccctcaaaattccatagctggagaggttacaatgtcccaagctacgtcgcagtcatcggttcatctaaaaaattatatttatacacttatgtcatatttttacaaaagcatgcatgtttattattgaaattgttttgtttagcagtcgtcggttcatctaaactcacgatttttctttggatgcaggtactagaatcgcaaaatcattaaacatactatatgcctatgagtacgactctccgaaccattgcacttgccaacatttgctatcagtacacaagtaattctccgtagtcacaatgctcccaataatcataatgccacaatctgctatcagctaagaaaactctattgtcattcgttattttattatttcttgcataaagctatcattctaccttctgtgactaaacgttgtctccatctacattcttgcataaggctacctttttgtcttccaatactaagcgttgtctccatctgcatttgcattgcataaggctactattctaccttccaatttgcataaggctatcattctgccttctgagactaaacgctgtctccatctacatttgcattgcataaggctaccattctgcctttcgaggttaagctctacctctctctggatttgcatttttgcataaggctaccattctgccttccaaagctaggttctacctctttctgtatttgcatttttgcataaggctaccgtcctgccttccaagactaaacgatgtctccatctgcattcttacataaggttaacattctgtcttccgaggttaagctctacctctctccgcattcttcatctttgcataaggctatcattataccttctgaggctaagctctgcctccaattttcttcgaaactaagcactatctcaagcatcgtctatttcatttctcttacgggctaagctttgtccttcaattcgcaagactaagctctgtcttgtccgcatcatgctactgcatctcatgggctgaaagattgcctcatactgcatctcatgggctaaaagatcgccaaattatccaaaggcgtaatcgttcagaggcatcatcttcatagcctaagaacaccatgtcatggcctgaggaccccttttaatctgttgcatatcattattcaaaggcaccatggttcggaggcaccatcctcatagcccgagagcatcatttcatggccggcgagtcctttattgtacgcttcatggcccagggaatcatggtctaaggacatcatcctcatcgtccgaagacaacattcatggtccgacgtgaatttgcatcatgtttaaatttatgcgcgatatacgcttgtattgtttctaattgcaggtaaaccggcgagcaacggacatcccggcagaagcggtcccactccagttcccgcagccatataaaaccttaaccattcccacaagccgtccactcaccccatcctggatattgcgtccgttcttgaaaagtctccatcggcatactccaccgacggatcctgaactacatatgacctgattcttgtaaaaccaggggtatgtaggtagatcaaaatccatggtgcgtcctaaatctcttcaaactgtttcgcttggtcaaaattggccatcatatctttacccgacaactctttcatccttcccgggtaaagagggcaactgttgatatccaatttttccctatatattttcaatatgcaaaataacttcaaatttaatatatatgcatatttaagcatatccaagtgttttattattttttcataatttttaaaggtttttaaatcaatttatttccctcttttatccataaaaaaccaataattgtgaccaaaattattatttttgtaattcatttgttggacttttatatttatactacgatatagctaaggtaatttttgcatattttttataaaattatttactatttttaagctaaattgcatataattgcaatattggcccttttaagattcaattatgttttatattcataaaattaagcctgtatttttaaattgttaattatatgttacaaatcattttagtactctcaatttattttcaggaattaatttactattttttataattttaaaagggaaaaattgtctatttaaataatagcccagttacatttcaattttagcctaaatatgaccccaaattaaacccaatttcctcggcccaattcccattaaaacccgatccctaacctaattaaacaacccaacccggattcctcacctacccttttgaatccaggctgttgatcactcaaatcaacggccaccattcacccttccataattaaacccaaaaagccccttaccctacctcattcttcaccaaactccgtccttgaatccctcttctctcaactctctctacaatccctcatgaaccctagccgtcgccatctaatcccacccgaatccacctcaacccctgcctaatccatggcctctcatggacatttgagatgtgtattagccttctgcggctcctgcgtgtttgtttatatggtttcatggccagacctcgagggaatctggtccattccttgctctatttctgtccatggcctttctctggccatccatgacctttctccggccattcatggcctttcaaggcagatccttgacttttagatcggtaactttcaaggtctttctctccttttctgcgttttccaaaaccttaatctataagatctttcatttttcttcagatctattttagatctgtgcttactatgtatttcttaagtgttttctcgaaggttcttcaacttttctttcaaaatgactcttcattttttccgattagggtttctcttaacctctcttttaaagatctcttctctgattttggtgttgtttcatgattttgctatgttacctgtttatgctttccttctacttgagtcagcatgtttaaaaccctagttctttttagtcttatccgagttctgaaattatttgcttaaatgtgtgcttatcttaagttcttcgtttatgactctcttttccttgttcgacttgtttgatttgagttcttttcatctattaaactcgactactgttgaagccctaaatttcttagaagtttttgctcacttacttatttccgatttctcttacctgatactatgttcttcttcactgttgattctatgtgactacttgacctacttgactactgtgctttgaatactttttcttactactgaatcctagcttatttttgccactactgtatgtttgtattatctcttttgccaatgtttttggcctcgcatgtctgatgcttctgttcactctatttatgtactgaaatgcagaaccatgtttctcctttgattgatcttgatcttgtgactgattgcaaaggcttttcttttatgaaccctaatttcactcacctgtttaaaattaattgattcctttccctttactgtgatgttttaccttgctgaatcctttcccaaaataagcctattttatacttagacttgattatttacttcataattttactactcccttatatggcaataatcaatcttttcccaaaactgatttcttaattaaagggaaccacttatgttaattgattctgattgggattgcttccatatttctgttaagactttacttcttaccttacttttcactcgttttcaaaaattataaataccctgcaccctctcttctttcaaagacacgaacaattgagttcaagaacacacacttacactcaaaactttctctcttttctttactgctgcttatgctactgctttgtttagccagctgaaagcccaaggctagactgtggaatcttgcttatttctttctttctgcactctgtttctctactggtatgtccatgctaattttgaagcatcaacaacaacatgtttctttagctatctcagttcctttcactcttgcctacttctgcttatgtttatgcaatcaagttacattactagcatgttgtaatatgctccatccccttttaaattaatgtttcccttatatatgtactctgtcagtcacttgttatgtgatttgctgacttaggaatcccaaacccccatatcccctctatgtgtttgtgttctctggctagtttgtgggcatgccctggcccttccacactgcactcatctttgtctggttatgcaacttgggtgtaagcactacccggggtcccttgagacccttagggaactttgacacaaccagatctaagaaaggctttgagaacattggtttttgaggtagtttattccataactcagagaggaagtcaagaatcaggcttcctatggttgtaactccttgttttcgcacttttctgatgtaactcattcatttttggtctgtaataatttgtaacaaatattgaggggctggctagtgaaaagggatggggtgattatacatgttttagctattagaaggatagatgacatgcctataggatctgtttaataaattctgcatgttttacttccacacttagacatcatgcatataaggttaaaatcagctttgaaattagatgtattgcctataagattaaaatcaatatttttataaaagtcatgcctataggaatttcgctgtgatcaaatcctgcttgtttcacttcacgttcaactagatatcatgcctataggacccaaatcagcatttaatatttagataccatgctggtaggaattaaaatcagcgataatcgagatcatgtctataggatctgagaccagtttagtaaaaaatcagtttgacttgtactgttcagaatcagtttgaacaacctattcctttcattaatgcggtttagaaaggatgcctatagggtccaaatcgtctgtttaaaaattaaccactgctctgctgccttcttaatcagtaatatatatcatgcttataggaaatcaccaatacacacttaggcaagcctcaggtattgatgattaaactgaatccgcctttgtttaattaacaactgctacaactagcaggcaggcatgattggggcttcttatctgagttatgtaataaatttgtctgcttcaacaaaaacaccctgtcttagtactttaaatttagaccctaactgtttttaagtcatgctatttatgtgcattgtctgcggaggtatatatgagcctcttatttatttatatgttttccctaatatgcagttctacgtgttttgtatgtcgccttagactttttacctttaaaactcaagagtcagcctaaaatcctccctcttataggaatagtagtcctaaattcctccgggactgataggaatgggacgggtaataacatacaatagaggtcgagaccaatctgcactttgataccttaacgaggtgggaaggatagatatgaatatgatgaccggtgcactaataccacgtgtattccctctttcgatgagtgtcataccgggtatcgcattgatgtgatccatattataaataaacctaggatcccccacccccctctttttacattctcaagtatttgtaaaatgtaactccttttcaaaatttgccttgttacagttgtttttcaaactcttatgtgtttaaacttaaatcccctactatttgagcctatatttgtctgtttgctaattgtacaaaattcacaaaactgtctggccgggaaccacactagtggatcctgagaggtgcctaacaccttcaccttaggataatttcaagccattacctatctctggtcatcaaacaaacttcaaaatgaaccctataggtgtcctaatgcaccttaaatcattaggtggcgactcttcaaatgcaaatccagttcccaaaaggaatgagttgtcctacctcaaaaatgtcataaccccgatttccgatgcgaagagggaaaaaggaggcgcgacaaatacagctaagataatttttggcccatacaattaacatcggaataaattggaaccgtacatgtaaatttcattaattaatctttgtggttgttctttaatgtaaatttaaatctagcttaatgaatattggtacgtacgtcggaagaaagaaattaaaacatggaaatcaactgtaacaacaggatgtgcaaatatactacaggtggtgcactatttttatattttttgttcttgattgaaaataatacatgttgtttgcaacaaatttatgcagagaaaaacaaaattgcaatcacaaacaactataaagaaaaaaagaattttatttataaacattataggttacaactctgtttatcccttgattcttccctccgatttattctatgtgattcgagggtcttagcagcatatttctcgaaagtagaatgatatgcatctccttgatgtatttgatgatcaagaagaatatagcagcactccgtttggatcttgactgttgctagaaatttcagcaagacatatttggcatgtctttgatctattaatgaatattccaagaattttatggaattttagagatcgtatatttgatctcgtgcatgttttgagagtttatggaactgttgagaccgtctttgaagaacatatgtagccttatttgtaggcatgaattagggtttggatggagtagccaccaagtaccctaatagactcctaataattcaagaatcgtcttgaatttaggatttatcttaatctgttaaaattttagtgtctacaactgccccctacttcaaggtttgtcgaggtgtaggcttgctgaaacttgaagacaagatttgaagtaccgaccatcacaacagataatcttgaaacttgtaattttcgatgttgatacccaattttttcctatatatatttttttaatacataaatatagtttcaaaataacatatatgcatatataagcatgtgataactagggattttgacgcattttatactccttcttgcttatgctttgattataaattcacacaaaatagtccaaaaaggctcataagttgtgcatgattgaaggtttgatcaacaaagtgacaagatgttaaagatcaactcgaaaggagtgaaacttgcacaagtaccaaagacaagacaaactcaggaaaaataggcctagtacagccacactacactttgggcggtccccactagggaaattcagagagctggtatttcaggcattaaggcagtgcggtcgtagaaggttttgtgaggtccgcactaaaggcaatgcggccgcactaccattctgtgtggtctacagagctaaggttcagagagggtgaagttggagctttcaagcctgggcggtccgcggtccagtttgtgcggaccgcactagaagcctctggggccgcagtccattctgtgcggtcagcagagcttgagttcagagagtcaagttttcaagttcaagagcctagtgcagccgcacaccattttgtgcggtccgcactaaccccacaggggcatttttgtccaaatttttcagtttaatataaatagatcctttttccatttttaggggatcagacattttagaatagttattgcactcgtgggaacaaatcttgtagccattttgggcatttatacttactttttatcattgaatctttgtatttagcttagcaattaattaatatgtgtttatcttcatctatttctctatttttctcttcaagtatgagtagctagacccattagctaggtttgtggctcaaccctagtgtgggaaattgatgggtgtttcactttagggctagattgactataggtgtttgttatttgggtcaatttcatggtttatttactgaattagtggttgcaaacactagtttgtgctaagttgacttaggctcttctttagaaagagggcctaagtctccgaaattgatccaacaaggaattgggatggactcaagagaattgatagtctcaattaaagggttaaacctcgagagagtaatacctgacttgaaccctaagttgcttgagcaaatttgcatacctattggtcttgagaaagtcaattaggcaaaatcacttgaaccatcgagaggtgtatagtgggtaaagtagtgcaacggttatatcatactccccaataatatcaatagagccttagtttcaagtacccgtcaattgaccacttaggtggatgccactaccctagagcttttagaatatttgaacaacccatagcatttaactcttagcttaatttgcagtttgtagtttgttaaaagtagaattataaaagaaaaccgtaaaaattatgagaagtgcaatttggaacgctacgcaatcctaggctaaatagatactcaattccaattctagctctctgtggatatcgatcccgacccaaaattgggtaaaagctgctctgaccctctctcgctacataattagtagtgcggagtaggtcgcgatcactttttggcgccgttgccagggagctaacggttttggctatctattcagttagtgttgtgtattgttcttctttccttctttgttacttacttgtttgtgttgcgactcaggtaccaatatggcattgaacaacactaatgaccctcttggaaacgtgattgcgggggaggaggtagatgatgttgaacaagatgaggtgcctcttgtacctcaaggacaatgtagaggccgaaatgccaatgctaatccaaatggcaatattccagaccctccttctccacctccaagagtggctcccagagtattaccgaaccaaggctatgcaagtgctattgtcccaccccgaatctgtgagggcaattttcagataaccaatatgatgttgaccttacttgagcagcgtggatacttcacgggcgctgcggatcaaaatgactacaaacatctcaaggggttcgtggatacatgctgggggagcaagcaaacgaatgtgtccgaagatgtgcttagattgagacttttcccattttcacttgtggggaaggcattagattggctcgagagactccccaaccattccatcacaacttgggatgagttggcagataaattcatttctaaattcttttcacccaggcatatggcggcacttcgagatgagatattggctttcaagcaagagaccacggaacctttgcatgagatttgggagcggtgtagaacgatggtgaaggagtgatatgaccgaagctatgatccaacaaaccttctactagggcatcaatacaacaaatcaatgcatagtgaaccaacttttcgggggcaactttgtgaagctatcatatgatgaggcatgtgatgtacttgatgagatggctgacacttcttctgcatggcaaagtagagccaatgtgcctcaaggtgaccccacggttattcatttgcataagaaattacatgaccatggacaagctatagcggagttgacgactaccatgaaccaattggctaaggatcagttgcaacaagtccagaatccttgccaggtgaatgccatggagggtgtcaatatgcttgttaccaagagaagacaaaaaaggcaataaaatcaagggaattctgagcaatttgttgatgactataatgggtgtcaaaattatggttatgatgaccaaagtgaagaggttcaatatgtaaacaactatcaaggtcaacgaggcaactcttcaaactaacaacaatggatacctcaaggaaattggggcaatcaacagtaaaatagtggtaattgggggaacaataatcaaaacgacaattgggggaatcagaacaacaatcaaggcaaccaagggaattggaatggtaataataacaatgggggcaataataacaatcaaggtagatggaataatgggaaccaaggaaaccgggggcaaggatttcaaaggcccccaatgtacgaacaaccaaacaatccaccccctttcctctctcaaggtcctagttcttctagcaatgatttaggtagaattgaaatgatgttcgaacaaatgatgaagaagaatgtggattctgatgcacaattggcatcccacaatacctctatccgaaacttggaggtgcaattgggacaaatctctcagtctttgaatacccgcctgaagggtgctctaccaagtgatacggtagtaaacccgaagagtggaaacaatcatgtgatggcggttacaacaagaagtgggagaggtggtgatgtgaatgcctctaagcaaaagcaagttttggatgatgatgttgagttgcacgaagaggaaatccctttggtagttgaagatgtggttgataaaaatgtgaacaatgaagtgaggattgatgttaacgatgtcgaggtggaaactcaaaatgatgtgaacccgtctaggaaacacataattgacatgccggagttagttgtgccaaaagccaaggttcctttgcctaggccacctccaccttatcctcaaaggcttgcgaagcagaaaaatgataatcagtttaaaaagttcattgacatgatgaagatcctgtccattaatgcgcctttggtggaggctcttgaacaaatcccgggctatgcaaaattcatgaaagacttggtcacaaagaagcgttctatggattgtgaaactataaagatgactcaccaagttagtgctatagtgcattcaatggcctcgaaacttgaagatctcggtgctttcaccattccttgcaccattgggagtgcggactttgccaaggctctatatgatttgggagctagtatcaatttgatgccctactcggttttcaaaactttgggtatcgggcaagctaggccaacctcaatgagacttcaaatggcggttcgatcgatgaagcgacctttgggcattattaatgacgtgcttgtccgggtggacaaattcatattgccgtccgactttgtgattttggattgtaaggtggactatgaggttcctattatcttgggaaggcctttcttacaacggggaaggcattggttgatgttgaagtgggtgagctcactttctaagtgggagatgaaaaagtcgtctttcatgtttggaaatcaatgaagaaacccaatagcaccgaggtgtgctcatttgtagaccttgtcacagctgtgattgtggatgacaccagtgctatgatcaacgtggaggatccccttgaggccatgctattaaatcttgatgtcaatgataatgcaagcagagtggagtgcgtgaatgccttacatgggataggctcttattcttatgagcctaggaaattatctttggatcttgaaaaccgaaaaactccaccaacaaaaccatcaattgaggagtcaccggtgttggagttgaaaccactacctccacatctcaggtatgagtttttgggctcaaattctactttaccagttattctttcttcttgtctaactaacatgcaggttgaggccactttggcggtgcttcaaaggcaaaaaagggcaattggatggactttggctgacattcggggaataagccccgcattatgtatgcacaaaattatcttggaggatgatgcaaagcgttccttggagcatcaaaaaagattgaatggggaaatgcaataagtggtgaagaaagaagtgatcaagtggttagatactggtgttgtgtaccccatttccgatagctcatggacttctccggtgcaatgtgtaccgaaaaagggtggtatgactgtggtaacaaatgacaacaatgaacttattcccactcggacagttaccggatggagggtatgtatggagtaccagaagctaaacaaggtgacccaaaagtatcatttcctattgccattccttgaccaaatgtttgatcgtcttgcggggagagcttttattaccttttggatggatactcggggtataatcaaattttaattgccccggaggactaggagaagaccatttttacctatccgtatggaaccttcgctttctctcggatgtcgttcgggttgtgtaatgctctgatgaccttccaacgatgcatgatggctattttcactgacatggtggaagatatcttggaggtcttcatggatgatttcagtgtggttggtaatttctttgaatagtatttgaaaaaattagatagagtattaacccgatgtgaagacaccaatctcgtgcttgattgggaaaaatgccacttcatggtagaggagggcatagtgctgggccataaaatttcaaagcgtgggattgaagttaacaaagccaagatagaggttatttcaaggcttcctccccccacttctgtcaaaggggtgaggagtttatttgggcacgcggggttttatcggaggtttataaaagatttttcgaatgtggtaaaccccttgtgcaagctactagaaaaggatgctaagtttgtgttcaatgagggatgtatgcaagcattcgagcttctcaagcttatgttgaccactactcctatcattaccgcaccaaattggagcttgcctttcgagctcatgtgtgacacaatcgacattgtagttggggctgttttgggtcaaaaggttaataaaatatttcatctggtgttctacgcaagcaagaccatgaatgaggctcaaaagaactacacagttatcaagaagagttgttggctatagtgtttgcaatggaaaagtttcggccgtatcttatgggtgccaaagtcatagtgcacaccgatcatgacgctcttaggtacttgacgacgaagaaagactccaagtcaagattaatgcgacgggtgctactacttacagagtttgatctagaaattgtggatcggaaaggtagtgagaaccaagtggcagaccacttgtcccatttggaggaggaggtgaggccttgtgatggccttgagatcaatcattcatttcccaacgaacaactccttgcgatgtcaatgaatgatatgtcatggtttgccgatattgctaattaccttgtgaccggaataattctgtgtgagctctcttctaaccaaaggaagaagctcaatagggatagtttggatttttattgggatgagccatactttttcaagatttgcacggatggtgtgatccaaaggtgtgtcccggaggaagagcaattgagtaacttggaggcttgtcattcttcaccctatggtggccatcatggtggggtgaggaccgcctctaaagttcttagttgaggattctattggccaaccttattcaaagatgcaggtgattttgtgaaaagatgcgacgagtgccaaagagcggctggaatttcgaagaaagatgagatgactctcaataccatcctagaggttgatattttttatgtatggggcattgatttcatgggcccatttgttagctcttgtgggaacacttacattcttgtggtggtggactatgtttcaaagtgggttaaagtcgtggctttacccaacaatgaggcccagagtgttgtttcatttctcaagaaaagcatttttacgaggtttggtactcctcgtgcaatcataagtgatgggggtctcatttttgcaatagagctttcaacacgttgctttctaagtacggtgtcaatcaaaagtttctaccctatcatcctcaagcaagtggtcaagtggaagtctccaacagggaaatcaaaagtatattgtcaaagatggtcaatgctaataggaccgattggtcgaagaagttggatgacgctctatgggcttatatgacagctttcaagactctgattggtacatctccgtatcggttggtgtttgggaaagttgccatcttccgattgagttagagcacaagaccatatgggctttgaggaagttgaatcttgaatgggatattgcagccaatcttcctgtagagcagctcaatgaacttgatgaatttagattccatgcctactccatttcatccttgtataaggacaagatgaagtaccttcatgataaatatgcttgtggaaaggagttcaaagtagataatttggttctcttgttcaactctcggttacgtctgttttcgggaaaacttaaatcaaaatggggtgggccgtttgaagttgtgtttgtgacctcttttggtgctcttgatttgaaaaataaaaatagtgaagttttcagagttaacgggcatcgggtaaagcattatattgggaaaattgatgacagccacgtggtggcacttcttcatttcaaatgatgtgatggtaacctgcgtcgtgccgcgacgttaaatcaggcgcttcttaggaggcaacccaagtgcttttcttcttgctttctttgattttctttgaagtataggattgatttttgggctaactggttatgagatgttacagggttgtgttaatgcagtgcaagacatagtgaaaaaaatgcacaggtctctgaagtttccagtgcggccgcagtacattttgtgcggaccgcactggtgtgggtaaaatgaagcctctataaagtttgccaccgcggccgcactacattttgtgcggtctgcggtggacctctgcagccgcagtccattttgtgcggaccgcagagtgttgccttatcaaacttgaacaaaacagttcagtacggactgcggtccattttgtgcagtctacactagtaggtgagactgggccccagtggcttctctataaatagaccttgagggtctcttgttacccttttcaaaattttaactctcaaagcatactaatattgttcatcccttgcatttgatcgtaattacttgcttggcattgattcgtttcacttcatctcataatctggtaacaaaatcttccctttccttgtttaattttgcaatttcatttaatttttatttttcttagcttctgttcttctccctcccgtatttatttcaattgcctagactagagtagttaaattttgaattcatgaggactttgttagtttaatggactgggaaatgacttgggggcactcattaggtgaaaatttggacttaaaagcaaaaatccaacgaaccctaactcaatgccaaacctgggcactcagtgcggaccgtggtcgttttgtgcggtctgcgattccctagtgcgttccgcggtaccattttgtgcggaccacactaaagaacttctgggaagctgaacattgggcagtgcggccgcactacattttgtgcggtccgcactagcccctgtgtggccacactacattttgtgtagtctgtactgtcaagatacagagggtgggtattctgaaccccacccatgtgcggatcgcatggccattttgtgcggtccacactggcccttgtgcggcagcactccattttgtgcggtccgcactaggtattttctacaactttctgctttcttgttgaaacactgctttcaactaatgaaattgattctaacaagttcaactgaattgtgtatgcagacaatggtgaaacaacaagggaaaggctctaaacaaccaggccgaggagaatcctccctgggagggaaacagaaaatggtcaaactcactccccaagctaggcaaaacatcaagaacataaggaaggccataaaagtggctgacaaagacattgacatttcggggagtgagtacgagccatctcgggatatctctttggactcaatcccagaatacatctcgtatccgtagagggccagacatagagacactcttcccctttccccgcagcccaagcatcagtgaacatttcttctaggtcgtctgagggctcaccagcgggtagtagggatgaatactctaccactcccacagcttcattatctgaagagggtgttgtaggagatgaggaagaagtaggtggtgacgatgaagtagaagaaggaggtgaaccacaagtgtgggggggggggggattgtgagaactagaaagccgaggtttggcaagataggtttgttagtgaagtggcataccataaattctaggagtggtggccggtgagaaagttgatcccggagcggagtttcattgatagtgacttgctacctcacaaccccaacatgaggagacagtttaggatgagagttggctgggaccatttccttgataagtgtgaggattccaacgaacacttggtcaaagaattttacagcaatgtagcccacatcaaaaagggctccaaagtgaccaaggttcaaaattggaaggtgttgtttgatgggaagtatataaatgaatacctgagcttcaatgagaggacgagaccttatacatggcaaatttggaaatgggagaggaggtttgtccatggctagcacagtacttggcaatcccacgtaccgtccctgactggttggctgctggaatcaaaatattgagaaagagcctgaactttgaagcgaggggatgagagacttttgtttgcagccggttggaccctaccactcatgacaacgcctttcctctccatcgggctgtattggtcacttctattatggtggggtaccccatcaatatggggaatgtgatgtcgaggattattactattgtgggtgccgagcatgatagaaacaatccattccccagcttcctgactgagtacttccgggacctgaaagtggatgagaggccctatgacatcaaggtcaaggagatagccccattttcctggtatagcatgaagggggataacaaccccaagagcaagaactacaaagctcatgcttctgccccaattgtccagtctaaagatccagttatggtagaggtccctgctgagcctacctctactcctgctgacatctctcccggaccttccacatccacagctattcctgctggtctatccacatcagcgggcccggagatcccatcttactgggcccatcatattactacccaccgtctaagccaggcacttctaaatttcaacaactggatgaagactgcctcatctaagttgtccatctagactaccacggtagaggctcagtcggcacctccagccctacaggtttcctagttgatagaggatgctttgaaagagattttagacaatcagaagaagatccttgacactcaggttgtgctctcaaaggtatatgattcacatagcaaggctctcaaggagcttgcttgggagcaaagaagctgcggaagacacgagcttccaaggagtccgtgaaagcattgagggttgatgttgaccgattgaaggaagatcagctgcctttggacttattgctcgatgcagtcatccagttggcagacccacaggagacctcttccaatcagccacaggatgtactaggtccagagcctgtctaggtcccagtagtagagcagcaagccactgggaaccagtctgagggtcccgagcacacagaggaaccagggaccactcataatcctatgcagacaagcagggcttagggaggcttctacatcctttttccttttttcctcttatctttttgatgttttatttagactagttggcattggggacaatgccagctttcatttgagggcttaggccctacattttacattttggatgattgtacatatatatttgatacatttttatgctttcttgatttttcatctttggtctgtatataattctgatatttcgttacatttatcacacttttattttactttagttctgtatataaagttacgtttcattgtacatattcatcccatctaatgtatatttaaatcccctcttgtatatattcattctattttccgcaaatttttcattcttagcttcttatttatgttcgtagctttttgttttgttttggacatttccaataagcctttggttttcttaataccacggttctttccaaaggtggagtgttgtatgaaccgggtggcacttcccagtgatggatggcatgacaaccttcttaagggtttgagtctgtttttctttctggttttagtagtgagtagttaagggtgcctcaagcaaagcttcacttgggcctagcacattttcccttgatcttatggtcaaaaacaaattgttgtgtttaggatggtgaaaggtgtgaccttgagactcttgcgttgaccgataattatcaagtggttttcgggatcattgtttgctcaaatcgtatctaaggtcattgtaggcccctaactctatgtctttaatgttcccttagcttgtgtggtgagtaaatgaattgcatatccaagtaccgagccattggtctagaactttccctaaatgtttttgaggcaaaatcctaagtgcattttgacttgagacatgattatagactctccttgatccaaatgatatctcgaacaattccatagcctaccaatgataagatccctagtcaacccttttgagtcttagacttttttctttcaagaaccatgatacaagcctatacccgttctaaaaagataccctctcttggcacccaacctttcctttagcacatggaaaaagtataaatttggggggagagacaaggatggcaacaaagtggtaaaaagtcacaaagaaaatgaagaaaaggaaaggcaatgaaaaataaagaaaagcaaaaagacaaaaagaatgttcaatctgaaaaagaataaaaagggattcaagaaaagcaaagaatgaaaggtgtggaaagctaaaaaaggagaaaaggtctgaaagacataagaaagagtgacagtgtgtctctctaaccccttagaaagaagtgaaatgactcaaagagtcaagtaaattacgccaaatgaatcaaaagaagtgcttaagggaagatggaacctacttcgaccaaaacatgtcctaccctgaaccaaaagccttcataatgtctccaaaaaagccttatatgatgttgagttgaataaagcttacattagtggatactcacataaggggaaagcatatggtatttagagccgaacttgtgactttttcttgagagagaagattgaatttccattaacctcgttttgcatgccactattctaaaggtaagtttggcttagggagagttgaggatgtgtgagtttgggttccacaatgaccaaggtaagtgaaaagtgttctttgatgtgttgagtcaactcttgatgctcttgtgtcacacttgatccatggtttttcaaaggttaaagttgtttatgacttatgtgtgttgaagacaattgttagtcccaattgatgttaattgaggttgctttaggacagctgaaaatttcttgaattttcccttaaggggtgggtcttatgttatttgcttgaggataagcaaaagcttaagtttgggggagttgataactagggattttgacgcattttatactccttcttgcttacgctttgattataaattcacacaaaatagtccaaaaaggctcataagttgtgcttgattgcaggtttgatcaacaaagtgacaagatgtcaaatatcggctcgaaaggagtgaaacttgcacaagtaccaaagacaagacaaactcaggaaaaacaggcctagtgtggccgcactacactttgtgcggtctgcactagggagattcagagagctggtatttcaggcattaaggcagtgcggccgcagaaggttttgtgcagtccgcactaccattctgtgcggtccgtagagccaagattcagagagggtaaagttgcagctttcaaacctgtgcggtttgcagtccaatttgtgtggaacgcactagaagcctccgcggccgatgtccattttgtgcgatccgcagagcctgagttcagagagtcaagttttcaagttcaagagcttaatgaggctgcacaccattttgtgcggtccgcactaaccccgcagggcatttttgtccaaattttttagcttagtataaatagatcctttttccatttataggggatcatgcattttagaatagttgttgcgctcatgggaacgtatcttgtagccattttgggcatttttacttactttttatcattgaatctttttatttagcttagcaattaattaatatgtgctcatcttcatctatttctctgtttttctcttcaagtatgagtggctagacccattagctagggttgtggctcaaccctagtgtgggcaattgatgagtgttgcaatttacggctatattgagtatggatgtttgttatttggatcaatttcatggtttaattactgaattagtggttgcaaacactagtttgtgctaatttgacttgggctcttcttgaaaaagagtgcctaagtctccgaaattgatccaacaaggaattgggatggactcaagagaattgatagtcccaattaaagggttaaacttcgagagagtaatacccgacttgaaccctaagttgcttgagcaaatttgcatacccattggtattgagaaagccaattgggcaaaatcacttgagccaccgagaggtgtagagtgggtaaagcagtgcaactcttatatcatactccccaataatgtcaatagagccttagtttcaagtacccgtcaattgaccacctaggtggatgccactaccctaaagcttttagaatatttgaacaacccatagcatttaactcttagcttaagttacaatttgtagtttgttaaaagtagaattataaaagaaaaccctaaaaattatgagaagtgcaatttggaacgctaagcaatcataggctaaatagacactcaattccaattctagctctctgtggatatcgatcttgaccctctctcgctaaataattagtagtgcggagtaggccacgatcagcatgcataagcatttttataatttttctataatttttaaaggcttcaaattgatttatttcctccctttctactcataaaatctccaataatcatccttcaaattatttttatggtgatttagccatctaaattctatatttatgccaaaatattattagaatatttttagccttattaaagcataattatgtttttaatacataaaatggtcttttatattttaaatcattttaatacacgaaattatttttttagaaatcatttattatttattataaattatgtagtgttaaaatggctatttaaaatctagcctaattgcatttcaattttagccaaattccaacccctccctaatcccaattcagcccaaaccggaccccaaattacccagcccaatttttgattaaaatacccgaccaataccggccaaatcctggtcattgatcgttttgatcaacggtccagattttcctttcctaataaaatcgatcaatacccccccccccaaacctaattcattttacaacccaccccgccgcactaaaatcctctatgctctcaaaacactctcaacctaaaccctaatctccaaatgccgaccctccatctatggccatctccggcaacctctcatcttctctcatgtcattcttgccatccctaaggccctcaagggaccagagccatgtcgacttgcatctagggttcatctcttgcctgatcttggccattccgatgtgatttcgagtgaaatcgttctatgttagccacgatctaagggttttcagtatgtttcttcacctctgtatggttttctacaaaaccctaactttgtctctaaacctcctagatctgcagatctaggacgatttgagtctgtttcttgtgtgttttacaatatccttgagattatctaccagaatcatttgacttcaagtgatttcttcaccttttctaaaattagggttttcgaaacttcttttaaaactttgtttgatgattctttgtgtttaaacttctgattctcacacatttttgactaattttataaacttgttgtaaccctatcccgtttgtactaaaaaccctaatgttggtggtttttcattttgtttctgatatgggtacttctgactatgttcttgccttagtttcttgtgacttttcatgatttgcttgtcctagtatgattctattgaatcttctttgttcaaactttcactgatattatgaacttgtgtgtgtactagccattcatgcaaaatttgtatgcttctctttgaatcagtgtcgtttaaccatgggttttgtcgaggctgtgtgaaatcctgactgttcatgccttacctcattttatatgctaagcatactgcttctttcacgattttctgaacctttgattactctgaatcccttattttctggtttaatttgattactttccttcaaacgtgtgattcttgcttatttactcaatttgattgatttgcttgccttaattaattttcccttaccttgtctgcattattacttgattcttactgattatttccctaattagaactttatgtacctagccgttaattacctattctatacctaaggctttactttattctttttcttaaatacctggcatgtttaccgttgattgaactgtccctcgattaagggaagatcttgctgatttatgggtaacttccctgattttctactcaattgatctcttgcctcattttgttaagttttcgactcctatataaaccttctcttcttttaagttcataacaatgataacaaggcactctagttcatctacactattacactattataacaacgataacaaggaactctagttcttttatgtaatttgttcagcttgtctgtaataattatttgtaaacaacattggggtgattactgaaaaggggtgggtagttacatatttatggggtgattcgtgtagataccatatttataggattatattaatatacttgctatgtttgctttaccacactagaaaccatgcctatagggttgaaaaggttcccatattagaactcatgtctatagggtttaaatggattcaataatagaatccatgtctataggtttaaaatcaacttcataatcagataccatgcctatatagtgtaaagtgattgagttcaattcctggtactgcatgtgcttatatttgtctcactaaaatcatgcctataagttccaacatcagctcttaacaattagatacgatgcctattggaaataaatcagaaattctgcctatagaattaaaatcaatttagttacacaagtcagtctaattcatgttagttcactttaaaattgttttaatcaactatccacttctttaattgagtttttaaaacacttccttcactcactactgctagaaagcatgcctataggatatcaagtgtccttttaaaactgttcactgatttactacatcaacgtagttatcatgctcttaggacatcactgttctgcgtttaggcaagcctatagggcgttttaaattctgcaactctaaaactatttttttgctacttaaagctattcagatttaacaggttcaaatcagtaggcaagttaaatagggtctttcacatattgtcctaattcaacgctatataacccctgcttacctagatatcatgttctagggttttctcttatgtatttgaatgttgtttgaagacgtgcacttatttatcctttaaaaccttaggaaagtctagaattgtccaaagaatagaggtcctaaaatacctccagggctacgaagaaggaatgggtagtgcacggataggacattgtcaaagttgctagaacgctttaggctatgaccaaggggagggacttgggtagaaagggatatgatgactacacgctaatgtcacgtgtagctcctcattgaggagtatttatcggacattgtgtgggttgatcttgtaggctaaccaacctaggacccctccttcccaaattccctttactttccatatgtatacaatttgtttaagcctttcctttgtttcattatttgagtcatgtaatgtccaaaaacatgctcttatttgtaattatgtgtttaaaactatttatttgttaatggactagttcgtaaatataagttcggctgggacccatcgttgtggaccaagaggggtgtctaacaccttcccctctaggttatctcaagcccttaccctaaatctctggtaatgcaaaccaatccaagagttaatcactctgggtgacttaacgcaccgtaatcctttaggtggcgactcttcagtacccaaattcccaaaaggaaataagtcattaccttcatgaacgtcggaacctggacttttccagcgaagggaaaaaaaggagcgcgacagcatggcgactctgctgggaatatcttagactcttaccataacgaacctatttttatgaattagtccaagcatgctctatcctaagccttttccccttatttaaatttaattgcctattttaagcatttatgtttctttattcctaaaactgacttgtctttttgttttcttttttctgtaactgtcttttcaattatttaaatattgtatttatttttcctacgttcaaatacatgactttatgctattaattggtgaataaattatgctccacatcatattccactcgtacgtatcaaatcctatagtgacgcttaatgagtggttgcgctcttcctatttattacccttgaatacggaaaggcttatttgtgataaaaccaatcgatcagcggtgcagtcgacggtttcgcgtgtttccccctcaagttgtccgtttgagggtacaagtataaaaccccatagttaccttactctgatcaaaattgtgcatgcattatggtcaaaccaagtcggagcaattatgttatccacataatgatcctttaagaagagacttatccaaagtccaccggaggttccataatcccaacggacacaaccacgatctgtgcattaatttggcaaactaaataccaatatgctaatcatgaatgtataaatagtcgagtctggtgggggataaaggcctaacccttttgttttgcagaaaatgaggtacggggtccccagattgggtatggttagcaacattccaccattgctgctagattggtagaggacctttcctcaagtgacaagaaacatgtaaggaagtacctgggtaacttgccttccctgctagacattgagccaaacaacaagttgatcgaggctactactttgctctgggacagtgagaggtctgtgttcagttttcgcaacgtagaaatgataccacttctagaagaaattggagggcttgcgggttgacttgggatagtcccgggttattggtaccggagaaccataccggtaaaaggttcttaaaaatgatggggttaaagaataatgctaacctggtatgcctgaaagaatattacataccctttgtatgagaggtatggccatagcaagtcctaccgtacctaccatgatgagttctctctcacttatctgggccacatccaccgcagagtgttcgtgttcatcgtatgcttcttgggcctgatagtgttcccaatgaaaagggaaagaatccacactaggttggccatggttgccaagattttgagggaagggatcaatagatagacatacactaaagtccccatgatcatagctgacatctacagggctctggagtgctgccaaaaggggccaaacatttcgagggttttaacttgttgctgcaattgtggttgttagaacattttcaaaagggtcactactgccaagaattttcgcgaagggcttggaacgaccatattgcctttcatcaccccaagcggatgacttacattccagacagatttgctcagccaaaaagtgccaaataatgggtagagttcttcgacaatctgactgatgaatatgtgcaatggatgttagaatagttcccaacagacgaattcatcatcagatccagaaacgctccacacttggtgctgatcgggttgagagggatatacccttatatccctatccgaggtataagacaagcaggcaggaaacaggttgtaccaagggttgccaatatgagtcatttcagggcagactttcaaaacaacgatgtcccttataagtgccaagctcagcacgtgtggcattgtaaaatcattgtggaaaagaacacattgagccagacaggtatcatgtggggtgtgagcctctctacccgacatggttggaggacaatctgaaggggatggtgatgctaggaactggtcgagggaataggatcataaacgaagaagctgaggctcaagtcaaatacaacaggctgcgcaagagggtccacgactctgagaatgagcactgggaaatacatgagagaaatgtacgatgattgaagaatggaaagagatggcagccacttccaacaggaaactggatgtggagcgaggaatagtagagctgaaaggcaaagtgataaagagaatcgaggattgtcagaacgctgaaggagaacatctggacagagcctacttgctgctgggtctgcgcgagctgggggatatatatgatggagtcaggaagattgaatctggggaaggtccttctatgaccaaataggctagatttatctattttcctaaaatgtaataaggccaagtgccaatagtgacttattttttattatcttagtgtcgatttgggattcatctattattatattattaaatgaagcatttattggcatttaaagttctccaaatttatttatcactaggcctacctcgggcacaatgaggtttccaaagtaggacacgaatttacatttccacaatatgtgtttaaatactacaaacatttcagaatcctcactaacttgttacctttttgtttttgcatattttttttaattattcccatctccttaggttggttcactcatactggcctcatcagcatatcatactagatctagaggccctccacctcctcctcctccaagcaatacaaagggtagagggaaagcaaaaatggacgacttaagtggtatccgaaaggagaatgttgagaacgcagaaacctcagatggccgtagtactccagccccaaattatctagtcctgagattggaataaaagatattggaattgcaaggagaacttgagtaggttcacaacttggcaaacttgtcactcaccttgaatgtccccgacatcaaccaacagaacacaaagaacccaatacctccccaaaacacacaaaaccaacatccacaaaatcctcccgcaccaaatcaatatgcaactccaccccaaaatctcaatccattgccaatattgactccgccacaacatcaccatcagccaactcagtacccaccaaccaccacttaccacactccccaaaacacaccacaacccattccccatccccaaaactccaccaacgaccatcactacgcctaagttcctggcacccatcaaagcaaccctatatacgtagaaattgtacctcactccatccaacccatgtcttatacaccagaatcctccgaaaaggacctgctcattaaaaacatggctgaagaactcaagaagttgacaagctgagttcaaggtgtcgaaggcggcaaaggaatagaaggtttgaattatgaagacctatgcatacaaccgaatgtagaactgccagagggatacaaacctcccaagtttgagatgtttgacgatacaggtgatcccatagttcatctgaggacttattgcgacaaacttgtcggggtggggaaagacaaaaagatccgaatgaatctctttatgaggagtcttactggggattgtttgtcctggtacattagccaagatcccaagaaatgatccagttgggtaagtatggcgtcagatttcatggatcggtttaggttcaatacagataatgcaccagatgttttctacatccagaatcttaagaagaaacctactgagactttccgtgagtatgctactcgttagagttccagctttggacgaggaacagatgaacaaattcttcattagagcataggatccgcaatattatgaaagattgatggttatcaaaaatcataaattctctgatatcatcaaactcggagaaagaatcgaagaaggaatcaagagtgggatggtaatgaattttgaggtgctacaggccctcaaagaaggcattacaatcaggcagcatatcaaagaagagaaatgttggggcagtaatggtggcccaaggcccgaaatctccacttacatattaaacacctctacccacgtaccaagcaccgccacccacatgtcaacccttatctcccaaatattcctaatcggccactttccaccatacttataactcccaaccatcccatttataatcacctccaactcgccaaaacttttcgagaccaagacctaatttcgatcgcaagccacccatacattacaccgccattgttgagcctatcgacctgttgtatgaaaggttgcaagctgtgggttatgccacttctgttcccactgtggcattagaaaacccatcccaatgggtcaatctgaacaaaacttgttcgtaccattctggtatgaagggacacaccactgctgggtgccgaacattgaaggataagatccagacactgattggcaacaaggtcatacacgcaaaggaagacacacctaatgtccgcgacaaccccctccctgatcatagatgcggtgaagtacatgtgataaagacgaatgaagaatgggaccctgagggatcgattgggtttattcgagaaggctatgactttaaagttgcagtcacacttactcctattgtggtacagactcagtcaccaatcaaggttgagataaatgcatcagttccatttgaggtagaggtggctttacatgtggccacccctgctccctttgaggtagaagtggtcccaccttttactatgacagtatcaaccacacctccattaaaatcaaaagcaataccctgggattatgttgtcgaggctcagcaaaaagggaacgccaacgtagaagaatctgatgatgcacaagggaagactaggactggaaggggctatatgcctgaacatttgggaggttcaagtaaggataccaatactaggtagcctatcattgagatcgggccgaatgacctgtggaggaaagtacaagcaaagaagtattccatcgtcgaccatctgaacaaaaccccagctcagatatctatcctgtcactatcataaaattcagaggcacgtaagaacactttaatgaaagtgctgagtgaggcttatgtacccaataacatcactggcggagaaatggccaacatggtggggcaagtattggaaagttataagattatcttccacgaagatgagctaccacctgaggggctaaatcacaatcggcattgcacattacagtgtaattgaagacaaattcattgacagggtcttggttgacggaggttcaagcctaaatatttgtccattggacactctgaaaaggttggacaaaggtttccatgaaatacgggtaggaagcatgaacgtgaaagctttcgatgggtccaaagggccacgatcggggaaatcaacctttgcttgcagatggggccaacttggttcgacgtcgagtttcaggtgcttgacataccagcctcatataatcttctgtggccgaccatggatccatgcctctgtgccgtgccttccaactacatcaagcttgaaattaatggaatcgtcaggaggtgatcattcacgggacgggagtcccatttacactagtcaaaccatcccggctattggacatagaagaaggctagaggggaaactatcatcacattgaacgggtcaatgccatcgagaaggataaatggtggagcagtaaaatagaaagcatattggcctggtctggatatgaacccggcaaaggattgggaaagaacctccaaggtatcaccaaaccaataagctgaaaaatcatggtaccacctttgggctggatacagtacacatggcaagagataaattggtcgcctatggctggaccgtactaccctctcgagcaacagtgcaccatttggaacaagcttttcaccaagctgatacgatatgggggactcagaagaggaagcactgctgggttgaagaatttgttcttggaggatgaggacatggactgcagtgccataattgaggaggaggaggaggaagaaggcctccattcaacgtaaagaagggagcgtctcaggaactggagccacaccatccgagcccgcgagtccctgggtagcttggcaaattttacttctatagccattctaggcatttaagatttccgtaattttttttaagatttacttgtttcaaaataaatgctgattcatcgagccgtacttgtcgatgatttttcattttaatcaaatgctttgctctttattattcattactatttttacttttctttctacagcttattattacttttcctgatgaaccagtgactgtgacatgtaatgaggcaagcaacatgaggatagtgattcagagaagagatgagatacccgaggaaatttcagggaggttgaaaattttgagaataagcctaagtccaatctggacgaaccaagcagtaaatttgggagacgccgagaccgtcaaggagactcgcatcagcattcacttgtcaacagagaaggaagagtacattgcttcctaaaagagtatgaggatattttgcatggtcatatgatgacatgacggtttgagcacgtccatagtggctcacgatgcctactaatccatgtgtccgccagtaaagcagaaactcagaaagttcaaaccagacatgagcctgaaaatcaaaggaagttaccaagaatcaaagccaaagttctcagggtggttgagtacccaacctggttagctaacattgtgccattccgaagaaggatgggaaggtcagagtatgtgttgactatcgggatttaaacaagagcaagtccaaggatgacttcccactaccaaaatacacatcctgatcgataattgtgccaagcatgaactccaatcctttgttattgttcgggctatcaccagatctggatgacaaagaagatgcagagaagacaacttttattatgccttgggtgtatactgttacaagatgatgccattcggtctgaaaatttggggctacttacatgagagccatgacaaccatcttccatgatatatacacaaggaaatagaggtgtatgtggatgatgtcattatcaaatccaaagggcgcagatcacatagcggacctgagaaagttctttgacagctaaggaggtacaatttgaaactgaatcccgcaaagtgtgcattcggggttcccgtaggaaaattattgggattcatcgtcagtctcgagggatcgagctggatccatctaaagtcaaggctattcaggagttaccaccgcctaagagcaaaaaggacgtaatgagcttctaggacgtctcaactacatcatcgattcatacacaatccacaatcatatgtgaacccatcttaagatgctagagaaagatgccgaaacaagctgacaaggattgtcagaaagcttttgacaagatcaaggagtacctgtccacaccaccatttggtcccgccagaaccaggacgacctttgctactctatctatctgtattggatggagccttggatgttttggacaacatgacgagacagaagaaaggagcaagccatattactgagtaagaagttcacaccttatgaagcaggtactcttttctgaagcattctgtgctttgacctggacagctcagaaattgaggcattattctgtgcctacactacatacctcatatccaggatggaccctctgaagtacatattccagaaacccatgccgactggaaagttggccaaatggcagatactgttaagtgagttcgatatcgtctacgtaactcaaaaggcggtcaaagggcaagcattggcagatcaccttgctaaaatccggtgggaggagcatacgaacctttgaaaagtattttcctgatgaagaagtatcatttgtggagaagacattaccgaagcatacgacggttggaggatgttctttgatggagctgcaaatttaagagggtgcattggagcagttttggtatcagaaatgggtaacattatccgtatctgctaaactcagatttcctgcaccaacaacatggcgagtatgaactgcatactaggctcaacatggaatcgacatgaacattcaggagttgctgtgatcggtgattcagatttgcttgtgcaccaggtacaaggagagtgggccaccaagaattccaagatattgccatatctgcaccatgtgcaggaattagaaagaggttcagaagatagaattccgacatgtgcccagaattcagaatgagtttgccgatgcattggccaccttgtcatctatgatacaacatccataagaattatattgatcccattccgtgagatccataatcagccggcatattggctcatgttgaagaagaaaagatggaaagccttggttccatgacatcaaggagtatttgtcaaaggagaatatccggagcatgcaaaccacactcagaaagcacactccggagattgtccaatcacttcttccacgcggaggaaattgtacgagaactcctgatttgggttctaagatgtgtcggcaaaggaagcttctaagctacttgaggatgtacatgcgggactgtggccctgcacatgaatggtttgtcttggctaagaagatacttagggcggttacttttggatgaccatggaacgattgcatccagtatgtccgcaaatgctttcaatccagagtgcatgccgatatgataaaagtgccgccaaacgagctcaatgcaacaagctccttggccattcgccgtggggaatggatgttattggtccgattgagcccactgcttcaacgaacaaggtttattctggtagccattgattacttcacaaaatgggtagaggttgcatcttacaaagctgtaaccaaaagagtcatcgtagattttgtcaaggatcgaattgtttgtcgattaggagttcccgagtccattcactataatgccgcaactcaatagtgatctgataaaagccatgtgtgaaactttcaaaatcaagcacagaattccacaacctacaaacctcagatgaatgagccgtagaagcggccaacaaaaacatcaagaagatactaaggaagatggtagagaatcacaaatagtggcacgaaaagctaccatttgctttattgggatatcgcactatggttcgcacattaaccagggcaacttcctacatgtagtttacggtaccgaagttgtcatcccagccgaagtagagattgcttctttgagagtcatataggaagctgaactcagcgatgcaaatagataagaagtcgctatgaacaattggccttcatcgatggaaagaggatgaatgcagtgtgccaaggccaaatttatcagaacataatgtccagagctttcaactaaagggtcaaacaaggcatttacaccaggtcagttggtgctgcagaagatcttcccacattaagatgaatcaaaagggaaattctccctcaactggcaaggttcgtattatggttcacgggtgctgacaggaggagcacccatacttgcaaaaatgatggagaatttggccaaaaccaattaattcagacgcagtcaagagatactatgcttgattatttacatttctcatctatgtaattgaactacgtttgacctgattccatttaagagggatacgtaggcagccttatgggttcggtcatatcataataaaattttcatttcccccaagatcagaaactgggagaattttgaggggtcctcaaaattccggagcaagtccagccaatgcaacatgtgtcagacggtcataattagttaagaaactggggcaaattttgagaaggattctcaaaattccgaagaaggttcagcaaggcctatttccgcaaacagccgaaggatcatctactaaactggggcagaattttgagaggaccctcaaaattccaataagagagtgaatgcatttgagatgtgttacagtcactagttcatctaaatatataatatatttctgaaataactctatttttataacattgaatatttttcgaaaaactctatttccataacagtcaggtgttacctagggaactcagaaagggctttcaggataagcaaagcaaagcagccgacagaagcacaaaccaaccttccccccacaaaacttacaatttttctttgaatgcaggcaatctagcatgcaataacatcctcaaatacatacacgtaacaaattcatatcaatcaggacatcagacaccgaatgtatctccagctaagacatacactactcttatttgctattgctctctacatgaggctaatccttgcctccatctgcatgaggctaatccctgccccctaattagtatgaggctaatccttgcctccacacttgcatgaggctaatccttgcctccatattgcatgaggctaatccttgcctccatatctgcatgaggctaatccttgcctccatacttgcatgaggctaatccttgcctccctatttgcatgaggctaatcttgtctcccctacttgcatgaggctaatccttgctcctatatgcatgaggctaatccttgcctccacat

SEQ ID NO: 75 - DNA, 1508 bp, Nicotiana tabacum
atggtgaaacaacaagggaaaggctctaaacaaccaggccgaggagaatcctccctgggagggaaacagaaaatggtcaaactcactccccaagctaggcaaaacatcaagaacataaggaaggccataaaagtggctgacaaagacattgacatttcggggagtgagtacgagccatctcgggatatctctttggactcaatcccagaatacatctcgtatccgtagagggccagacatagagacactcttcccctttccccgcagcccaagcatcagtgaacatttcttctaggtcgtctgagggctcaccagcgggtagtagggatgaatactctaccactcccacagcttcattatctgaagagggtgttgtaggagatgaggaagaagtaggtggtgacgatgaagtagaagaaggaggtgaaccacaagtgtgggggggggggggattgtgagaactagaaagccgaggtttggcaagataggtttgttagtgaagtggcataccataaattctaggagtggtggccggtgagaaagttgatcccggagcggagtttcattgatagtgacttgctacctcacaaccccaacatgaggagacagtttaggatgagagttggctgggaccatttccttgataagtgtgaggattccaacgaacacttggtcaaagaattttacagcaatgtagcccacatcaaaaagggctccaaagtgaccaaggttcaaaattggaaggtgttgtttgatgggaagtatataaatgaatacctgagcttcaatgagaggacgagaccttatacatggcaaatttggaaatgggagaggaggtttgtccatggctagcacagtacttggcaatcccacgtaccgtccctgactggttggctgctggaatcaaaatattgagaaagagcctgaactttgaagcgaggggatgagagacttttgtttgcagccggttggaccctaccactcatgacaacgcctttcctctccatcgggctgtattggtcacttctattatggtggggtaccccatcaatatggggaatgtgatgtcgaggattattactattgtgggtgccgagcatgatagaaacaatccattccccagcttcctgactgagtacttccgggacctgaaagtggatgagaggccctatgacatcaaggtcaaggagatagccccattttcctggtatagcatgaagggggataacaaccccaagagcaagaactacaaagctcatgcttctgccccaattgtccagtctaaagatccagttatggtagaggtccctgctgagcctacctctactcctgctgacatctctcccggaccttccacatccacagctattcctgctggtctatccacatcagcgggcccggagatcccatcttactgggcccatcatattactacccaccgtctaagccaggcacttctaaatttcaacaactggatgaagactgcctcatctaagttgtccatctag

SEQ ID NO: 76 - DNA, 2919 bp, Nicotiana tabacum
atggctgaaaaaacttccgatctctttgcctctatggagatgagcaggttctacaccactgacccatatatggaacctttcattttgactgagccttcctcaccctctaccactcttgctgctgcagtcacaccttccccaatttcccaatatcttcccaactcagaaacctttaaaactactattttgttctccccatcgtctgttgttcccaccaatcaaaccctaagtggagaacaaggtcaaaatactgagttcacaagggttctgaaatcgttgccaccgatttcatggttttggaagcaccggttgaagaaaagaaagatgttgtaactatgtttgtagtatccactgatggggtattgcatgaaattacatcccaaaaaaatgagatacacgatgtggaggaataaggggccattgtggctattgaagggtatgcaatagcagatactactggggcatcacatgaggaacctgatccctctccggaggacccaggttagggctctcatccctaggacagtactattcctgcatttgatgttgtgcccctgggaattcaagcacctgaaatacgatctagtgatgaataagacctggataatgtggctcttgatgcattcataagtaagcgaagggttgcgtccacccttgagtctgaaatcaaacgacctactaccacgcttcaagtcaaagtggcctacgactctactctccaaacgagcaagaagagtagtaagaaaaaaaaagaaaaaagttggtgaaggatggtgtacctgtaagtgatgaggctatccttgtagtcgaggtggaagagggaactccagaggaacccggttcacttgttaggcgatctttgaaaaagacaaagcctgtgtcaatagagaaagggtcaacatctaagtccaaaaagaaggaggtagtgagtgagttttctatgtctgatgaggatgtactagttaagtctaaggcaaaaggcaaagtcagtggagagaagtttgggaaacgcaagtcggaatcttttgacgaacctagttctatgaagaaaatgagaagtgaagtcagccttggctctgagcttttgaggcatcaaaaagttctattgggtcgtatgtttgacccaacaatctctgatatggctggaatgcgccaaattctggaaatggtcgagtttcaacgttgggtgcatctatttcacatggatgcacctaaggtgtatgaggaggaggtacaaagtttctttgctagcctctttccagttgatactgaccatgtctatgctttggtcaatggggtggacatcgtgtttgatgtaaaattgcttggagagattttaaaagttcctacagttagggtgttgagtgtacgagatgtttgtcagtataacttcagaaatgcaatggtgaaagaaaatgctaatcagaaaggggactagatccataagaaagcactactccctgtttaccagttgttatttaaattggttaacaaagtcatgttgcctcgagccgaaaggaggttagtgacttctaagtctgacctattcctaatggagcaacttgacggtttcaatcctatgattcttcctgctattatgatcgaacacatgcaaaaggtttccaccttcaaggacggtaatcatggacttccctatggattctttcttactccagtgttcaaattctttaaagttccactgggaataggtaaagtggggtctcgaaagcggacattctcatagacaactttggaagagtgtgagtgtgtggaaaagtattgggggggaggagtaggaaatacatcaaccgtttctcagcttatcaacgtccaaaacagtgcagctgaggaaattcatcggttgaaggccatgaatgttatcctggaagatcagcaagcccaaggggttcccatgtcgaatgatgaagtggcttgtttgacacaggagaatgctaatctcagggcgcaagttgagaacttgaaggcggaactgctcaacgagcaaaagtcggcaaacaccttaatagacctcgttctccaggcattttctgctgctaccaatccttttactcctagtgccctaaagtacccctttagtgaccagttttctggatatgtttcttatgtttttgtttcattgttgatggtttggcggatgtttttttgttttctttttttgatggttgggaggaaacattactactcccgttagcaagtccaaatgttgcctctagcctttttcataggcagaggtatattaaatcgttattaatattaattctagttttattatgtcagtactctatgtgttctattctctatcatgattgtgtgcacatatgtggcatgagttagcttcactggacttctttgtgctgttatttttttaatgatgccaaaagaaggaaaaaaataataatcagggggaacacacatggaggaactagttcttactactctgatcatgtaaaagataaggcatagtcttagggggaactctctgtgttccctgatactttaaaactggtactgccctaattccagtttataaatgttaagtttgtcatcatcaaaaaggggaaattgatatattttaaatactcttgccttatgttttgataatctaacaaacttactgttaagaactagatagggaacctgacctacttggattgctgcaagctttaacgtattccagctaaaggtgaactgctacagcttcaggagctagaaacccacacaaggacctgatgctcttgtggtttcgtcatagctgtacagagtcaattggacacaactagaaatgaagtgactggcgtcactgtttctgccgtactgcactgtcctcccactcattctctaacaaaacaaagtactcacatcatttcaagtgatgtgatcaagatgtacccacaatga

SEQ ID NO: 77 - DNA, 2397 bp, Nicotiana tabacum
atgcaatattctgatcagcagtcctacagtgcaccaccagctcctatcagtgcactgctgctccagagttttcggggtggttattcaggtcgccagggtcagtctcagtttcctcagccacaacacttaggtggatgttttgagtgtggtgagtatggttatattaggaggacttgtccgaggttagtgggtactcagtcgcagcagcagggtttccgcgctatggttggggcaccaggttttccacagaccacccagccagctagaggttctagatgtggaggtagaggatttagaggtggagctcagaccgctagaggtggaggccagccagctacaggccgtcccagaaatgtagtccagggtggtggggcccatccctgatgttatgctcttccagccaagcccgaggctgaggctttagatgtagttattacaggtacggttcttgtttgtgatagagatgctttagtgttatttgatccagggtctacgtactcgtatgtgtcatcttattttgcaccgtatctggacatgcctagtgattcattgagtgttcctgtatatgtgtctacaccggtgggtgattctattatggtagatcgagtccatcgctcttttatagttgtgattgagggtcttgagactcgtgtagatctgttgcttctggacatggtcgatttctatgttatattggggatggactggttatcaccttaccacgctatcttagactatcatgccaagactgtgaccttagccttatcgggtttacctcgtttagagtggagaggtactcctagtcattctacccgtaggtttatctcttatgtgaaggcttggcgtatggtcgagaaggggtatttgtcctatttggcatatgttcgtgattctagtgccgaggttccctctattgattctgtacccgttgttcatgagtttcctgaggttttcacttcagacctgccaggtatgacacccgatagggatattgacatttgcattgatttggatctgggcactcagcccgtttctattccgccgtatcgtatggctccgtctgagttgaaagagttgaaggataagttgcaacacctacttgagaagggtttcattagacccttgtttcaccttggggtgcgccggtgttgtttgttaagaagaaggacggattaatgagaatgtatattgattaccggcagttgaacaaggttacaatcaagaataagtatccattgccgaggatcgatgatttgttttatcagcttcagggtgccaaggtgttctcaaagattgatttgagatctggctatcatcagttcaggattagggcatccgatgtccctaagacagctttccacactcggtatgggcattatgagttcttggtcatgtcatttgggttgatcaatgccccaacagcttttatggatttgatgaaccgcgtgtttaggccttatttggactcgtttgtgatagtcttcattgatgatattttgatatattcttgtagctgggaggaccacgagtagcatcttagagtggttcatcagaccttgagggataaccggttatatgctaagttctcgaagtgtgagttctggttgagtttagttgcatttctggcctagaccagcatcagctacacagattcagagtttcttgggattggtaggctaatatcgtcggttcgtggaggggttttcatctatcgcagccccaatgactagattaacctagaagggtgcccaattcagatggttggacgagtgtgaggcgagctttcagaagcccaagacagctctgaatacgacaccagtgttaattttgcccacagattcagggccttatacagtctattgtgatgcatatcgtattgaacttggtgcagtgttgatgcaggatggcaaggtcattgcttatgctttgcggcagttgaagattcatgagaagaactacccggtccatgatttggagttggcagccattgtttacgcattgaaaatttggagacattatctgtatggcgtggcatgtgaggtgttcacggatcacaagagtcttcagtatttgttcaagcaacaggagttgaatttgagacagaggaggtggttagagttgttgaaagattatgatatcactatcttatatcatccgggaaaggccaatgtggtggccgatgcattgagtaggaagtcatccagtatgggcaatcttgcttatattccgggcggtgagagaccgcttgctttggatgttcgggatttggccaatcaattcatgaggttggatgtctctgagcccagccatgtgctagcttgcacagccgcttgttcttctttattggagcgtatccgtaatcggcagtatgatgatccccatttgtgtgttccttag

SEQ ID NO: 78 - DNA, 895 bp, Nicotiana tabacum
ctaattcttctcattctcttttgcaagctcagctctgagagcatctctctcggtctccatttcagccaacctcttctttagcctatcaggctcagcatcctttgccctactttcttgcaccaaaactcgcactttgctattcactggtacctttttggatgaaccaggttttttgggagtgatttgagcctcatagttacaagcagtcaaagtgttagccccaaaatgatccttgtttgtaccaacttcccatttcttgatgggtacctttaaatgtgcaagaacaatcgtgagaataaaaccatagggtatgacataagtcttagttccatttagaaccctgtcaagaagctgaattttagacccaggccaatttatttgccgcctattgtccaaacattccataaggaccaggtccatgaatgtggaaatgtgcctcctttcctaccttggcagcacacatttgtttacaaattggagcaacactttgttgggtggcttcatctcatttttgtaaatagccttgggctcaatttcctcctcattgtcacaaaattttctagtactggcaagggcagtagggagattctctaggcttgtccatttgagcttcttatagtcattgtatcctttagaatgcaccccaagatctctctcagctctttctcatcaaaagtcaccatcaccctttaccacactggtgaccctaccatcttgatctcacaatttgccataaactgcacaatatcagttatggccaaccttccatcatctgaaagaccatgtccttccatccttgcacctgtaacttctccagaagcattaccattccttcctcctctaagttcctgaggagcctacctttcaagatggttctcttcccaaacttaaccat

SEQ ID NO: 79 - DNA, 4787 bp, Nicotiana tabacum
atggtgaggaattactgcgggtggagcgagggggtaacactgcaggtgctttctccaaataagggtattacagactccactgatggagttttgagcgtatacctataccctttcgcatttggcccccctgctagggttgtgcttgatttttgcttgaagtatcgagttactctggcgcagatttatccatcgtttcggcgaatggtaatgataatgaggttcttcgtggagaaggttgggctcgaattcacgtttaatcacctcgttagactataccggccatttcattatcgaggcctgctaactctgaggtgccgtttgtccacgccctttgttgtcgatgatgaagaagacaaggaccgagagtgggccagttggtttattcaggctcaaactgctgacattatcccaacagggcttttgccatttcctgaagggtggaatcatgcacgtgagtggagtgtctggcgcttttttaaattttgcctatagcgaaaatcagttgagtaataatgttgtctaccttgttgcagcaacttcgtggatgccgggcaaagtccttgaccttcccgtctgggtccataagttggcgacccattcgacttgcgacgagcgcaggtggcgagctgtatttcgtaccaaatggggagtgaaataccaaggtatgtgcgtatgttgcctttgacttggccttcgtatattcgaggtaatattttcccctttcatttgtactggattcaccgtttgtagatacagggcggttgtttgggatgagacagtgttcttccgaagaggagaaagagtcgtcagcctccaagccgagggaggatggtgataagggggatcggcacccgcggtgtgatggagcttttagtggcattgggcgggctcagatctttgagtagagggcatcgtctgagcctgatgttcccggagtatcagattcccgggcggcgattcctccgagtgaatatgctctgcccgaggttggttctcctggggccggagaggcaggatcaacaggaatgtgttctggcttagaggaagtccatcggcttctcttcgaggtgagtttaggcgcgttttttcctgtatgtcacgccctcctccctttattgagttttccttgcataggcctgtgatgggcttatgtctaagctgctctgtcaaggggccaggctccagaaattcttgaacgatggcgagtcctttaggctccttagccaagagaatggggctaagttggcacgttggcgatatgaggcgtatcagagctcaaactatgagagttgtttgatagagcaggtaactttatatagtatgcgctttgctcctctctaaccttaaggctcaccccttttgttatatcagctgcaaaaaaaggcagaggccttggagtacctcaaaggcgacgtcaaccgcgtcagagttgtttgtggggagctaagggctcaagagcaagcttgagctttagaggagatatgtgcctcagccagggtccctgccatcgaggcccaactctgcttgactcgtgataacgccaaagttcaagcggacatgattgggaaactcgaatctgatctcttgaaggtcagagctgagataattaatgcccaggctaaagtggcgctaagccggaccaaggctgatcaggagatggcgattcatatgaaggatgttgctgatgcccaagctgagctaaagcgagccctcgaccgggagaagaggatcgaggagtatgttcgttgcagatctcggagagaggtactcgaggaggccagtgtacggggcttcgttctctcgaaagaattggctcgagcaagggtggatgagcgcgacgctctgtaacttcttgctgacgtcgcggagggagaatttgacaagttgtagccctttagtgcggagtgtagatttcgccattttgtcgctttgtttctgatatatgtagagcatgcttgtagatggagaatgcgcccttttcgcgcatataatatgtaggaagaaacttgaagctttattttttctgtacctcttttttgttattgcttttcgactgggcaggccggttttggtgtttggcgggatcctcgtaggtccggaactggtcggatagacctaggggctcttaagtgtaatcccttacgtgagctggtgctggggcctccatgcttggcccgactgttttaggcttagtctctgagtcgggcttcgtctcaagccttttgcccttgaatcttttatgcccgctcgggcaggcattaattatttttatttcttgctcttgggcatttgccgtttcgactattttggattcagtctccgagtcgtactgtgactcgagcttcaattgaccctcaagctctttcctgcctgcataggcggatgatgatggccttttgtgctccgggtcgaaatgaccttactggcacatggcccggagatttgctcggctggcgatagtggcatttatgtcgtgcccttaggcatattgtagtttaattattccgggtcaagcctccgagtcgcgttgtgacttgatcttttattgacccttaagtacctctggttttcagactgacgatagtgcctcttacgctatttcggtcgttgagacctttcaatatgtggctcggaggtttgcatagttaactattttggatccgatctctgaaccgggttacgatttgagctcattttaatcctcaagttgtcaaattttagctagtgacaatggctcttacgctgtttggtcgtagagaccttttaatatatggcccggaggcttgcttagatggcgacaatggctcttacgctgtttttgcctgtgggcttttttgtaggctttgttttctgctcgttaaggtcttttggaatatttttgcttgacccgtcttcggttctagaggaacttcgatttcaagtcgttgtcggcgatgttttgagcacctcaaaaggttcatagctcgtaggttgagtagatcaacactttggcggtttggagtcgacatggtcggggttcgtttttgcctgttaagggaaccctattttaaccggttcttttcgaagtatatttggagtagtgtcctgagattttagtaacagtcgggtgtccccgagtcatgttattttggctgtattaaccgttttgatcatagtcatgtgcgtttggccgtagccatttttaatcccgattgatagtttaggtgtctacaccgagggtatgccctttagggatttttacacatgcgacgtataacctaaacttcaggattttcatgtttgttgaggtcttacagttaatcattcctcttgaggtcttatagtttgtcatgcctgttgaggtcttacagtttatcatgcctgttaaggtcttatagtttgtgtaatatataatagatctggttacgttgaggctgcctgctaggggtctcacagtttcgatttttccagcatatgacgatcaatggcagtctctgagtcatataatttgtttaagcttgaagaccgctcctcatgagctcggagttgccttgtaggggcttgttgagcccggagttctaaccctggggtcgtgcgggtattgaattgctgatgctaagtctccgagtatctcgggatgcattcggtagagaggcccttgccatgagtatgttgaaatccccttttccgaagtacgaaatgccgaaaagatattctttattacttgtcataaatatatgttgtaaatacatgttctctcgtcgttgtgagctcggcccacgtaggtacgactcttcggaccatctgattcgttacaaggttccctcttgacactcagtctgatattttcggtccttctgagggaatggtgcccttgaaagaagatcatcgcccgtcgttcgattgtagaagaaggcatgtgattttgtcgtatcctgctggcaggaccctctttgggggtacactgctctgctaataatctttttggcgggaccctctttgggtctaaagtctgatcgagggaatagagcacaacgggccctgctaaggccttggatctccgtgtggagttagaactttcgaatgccccggctgattgcctgcatataagttagtgaaaaaataatgaaggagtgaagtagttcctcctcaccgcggggtgcgtaggtaacctttcgaggttcgggatgtttctgctgttccgaggcacgagccctaatacagccttctgctgtgttcaaccaagcttagcagaagatgcgattctgcttaccctttgatccttttgagggcggacgtattgatgccggcgatgcgttacatggtgagggttttcctctcgtcgtgtgcagctccttgtcgaatactttagtcccacccttgtcctggggtttcatccatttggtggagtagggtcgaagttgcctccggggaggcgtgcccgttgtcatctgaataagacgtacgtgccttgcgtgttcggcattccagtccgagctgatacgggttgtattaagggagtggtcttcctgatgtggcgatcggtgcctagaatctgtcaaagattcgagatgtgggagtgacttggttcgttagtccgaatcgccccattggctttggtttgacatcgttggtataattaattgaacaacctgtattcatgaacacatgttttatttggaataggtcaaatgagtgagagggttaccaacacatcaatacgaggccgaggcgaagtctcggcgtccctttccttggaagcaagggtgtcctttggaatattccccagaccagtgtttccccggtga

SEQ ID NO: 80 - DNA, 916 bp, Nicotiana tabacum
atgcggaggagtagaagaacaagcaatctcttccctcttgatcctgaaattgaaagatcacttcatagagagaggaaggagttggaagctagatacaaaacagaaagagagttgggcattttagttcaaccacagccaatagtgatggcaggtaatggagggcgttcggtgatagaagctcgaaggccaaatcttgctaatatgactcaggctattgttaagcctgatatcactgattactttgagcttaaacagtacacggtacagctaattcagtccactaggcaatatgtaggtctatctcatgaagacccgcagaggcacattcagaattttttggaaatcacggatacttacaactttccaaatgtttccaaggactatgtcaggctaaccttgtttcctttttcattgttgggggaagctaaagaatggttgcagaaggagcctgctaattcaatccatacttgggatgatttatcaaagaaatttttaatcaagtttttccccactaaaaagacaaagcctttgcggagccagattcttgggtttcaacaacgggatggtgagactcttcgccaagcttgggaaagatacaagaaactactccgagactgtccacatcattgtcaaactgatgatattgggccatacttttgttgatggattagatgagacttcaaagatgaatcttgattcagcttgtggacgtagttgcatggcgagactatatagtgaaatacaacttttgctaaacaacttcactgttaatgatcataattggcaaggtgagggagaaccaaggagagcaatgaaacagaaagcagcaggggtacttgaacttgatgatttttcagccatgagagcagatatagcaaaattggcaaatcaaatgaatagaatgacaatgaactag

SEQ ID NO: 81 - DNA, 6537 bp, Nicotiana tabacum
atgggtagaattgaaatgatgttcgaacagatgatgaagaagaatgcggattctgatgtcagttgcttcccacaatacctcatcgaaattggaggttcagttaggccaaatctcacagtcttgaatactcgccctaagggtgctctaccaagtatataggtagtaacccgaagggtgggaacaatcatgttatggcgtaactacaagagtggagaggcggtgatgtgaatgcctccaaacaaaagcaaattttgagtgatgatgttgagttgcaagaagatgaagttcctttggttgaaaatgtgattgatgaaatatgaatgaagaagtgaggattgatattcaagatgcgaggtggaaactcaaaatgatgtgaacccgtctagggaacactaatagacatgccggagccggttgtgcctaaagccaaggtcctttgccaaggccacctccccttatcctcaaaggctcgaagcagaaaatgagaatcagtttaaaaagttcattgacatgatgaagagcttatccattaatgtgcctttggtggaggctcttgaacaaatgcgggctatgctaaattcatgaaggacttggtgacaaagaagggtctatggattgtgaaactataaagatgactcaccaagttagtgcaatagtgcattcaatggcccgaagcttgaagatcccggtgctttcaccattccttgcaccattgggagtgcggattttgcaaggctctatgtgatttggggctagtatcaatttgatgccctactcgttttcaaactttgggtattgggcaacctaggccgacttccatgagattacaaatggcggatagaacgatgaagagaccattgggtattattgatgatgtgcttgtccgggtggacaaatttatcttgccagctgactttgtgatcttggattgtgaggtggattatgaagttcctatcatattgggagacctttccttgctacgggaaggccttagttgatgtggaagcaggggaactcaccttccgggtgggtgatgaaaaagtggtctttcatgtgtgcaatcaatgaagcagcccaacagtaccgagtgtgctcttttgtggacctcgtcacaagtgatattgatgacaccagtgcaatgatcaatgtggaggacctcattggaggccgtattgttgaatcttgatgtcaatgatgatgaggccgagtggagtgcgtgaatgctttacatggaatgggctcttactcttatgagcctaggaaattatctttggctcgagaataggaagactccaccaacaaaaccttcaattgaggagcctccggtgttggagttgaaaccactgcctccacacctcaggtatgagttcttaggctcaattctactttgccagttattctttctcttgtcttactaacatgcaggttgatgccacattggcggtgcttcaaaagggaaaaaggcaattggatggactttagctgatattcggggataagcccgcattctgtatgcacaagattattctggaagatgatgcaaagccctccttggagcatcaaaggaggttgaacgaggcaatgcaagaagttgtgaaaaaggaggtgatcagggttagtgtaccccatctctgatagctcttggacttcaccggtgcaatgtgtaccgaagaagggtggcatgaccgtggttgcaaattacaaaatgagttgattcctaccagaaccatccggttggagggtatgcatggactaccgcaagttgaataaagtgacccgcaaggatcactttcctttgccttttcttgatcagatgttagaccgacttgctgggtgccttctattttcttggatgggtattctgggtacaaccaaatcttgattgctccggaagatcaggagaagaccacattcacttgtccataggcactttttttctaggatgccttttgggttgtgtaatgcaccggctacatttacggtgtatgatggccattttcaccgatatggtggaagacattttggaggtgttcatggacgactttatgttgtggggattcatttgatgatgcttgaagaatcttgatagatttggcccgttgtgaagaaaccaatcttgttctcaattgggagaaatgccactttatggtggaagaggcatagttcttgggcataaaatttcaaagcatggtattgaggtagacaaagcaaaaattgatatgatttcaaggctccctcccctacatctgtcaagggagttgaagttttcttgggcatgggggttctcggagatttatcaaagacttttcgaaggtagtgaatcccttgtgcaagttgttggaaaaagatgcaagttcgtgtttgatgaaaatgtatgcaagcctttgaacttctcaagcataagttgaccaccactcctatcattaccgcacctaattagagcttgccctttgagctcatgtgtgatgcgagcgacgttgtggttggagcggttttgggtcaacgagtgaacaaaatgtttcatccggtgtactatacgagcaagacaatgcatgatgctcaagtgaactacacggtgactaagcaagagcttttgtctattgtgttcgcaatggaaaaatttcggccgtatctcatgggtgctaaggttattattcataccgatcatgccgcactccgatacttgatgacgaagaaggattccaaagctagactgatgcgatgggtcttgttacttcaagctttgaggaggaggggaggcctcgtgatggcctagaaagcaattattcatttcccgacgaacaactcctttcggtgtcgatgaatggaatgctatagtttgcagatgttgctaatttccttgtgactggtataatcccgtgtgagctctcttctaaccaaaagaagaagctcaagcgagatagtttggatttctattggtatgagacatacttgttcaagatttgcacggatggtgtgatccgaaggtgtgtcccagaggaagagaaattgagtatcttggaggtttgtcattcctctccctatggtggccataatggcggggcgaggacgacttccacagttcttagttgtggattttattggccaactttgtacaaagatgcaagtgaactcgtaaagaggtgtgacgaatgtcaaagagggggcggaatttcgaagaaagatgagatgcctctcaataccatccttgaggtggatatttttgatgtatgaggcattgattttatgggtccgtttgttagctcatgtgggaacacatacatttttgtggcggtggactatgtttcaaagtgggttgaagccgtggcttttcccaactatgaggcgcagagtgttgttgcatttctcaagaagagcagttttacaaggtttggtactcttcgtgcaatcataagtgatggggggtctcatttttgcaatagagcttttgacatttttcttgcaaagtatggtgtcaatcacaaagtttctactccctatcatcctcaagcaagtggtcaagttgaagtctacaacatggaaatcaaaaagatattgtcaacgacggtcaatgcttataggatcgattggtcaaagaagttggatgatgctctatgggcttataagattcttacaagactccgattggtatgtttccatatcggttggtgtttgggaaagcttgccatctaccggttgagttagagcacaaggccatgtgggccttatggaagctaaatcttgaatgggatattgcagccaatctctgtgtggagcagcttaatgaactcgatgaatttcgattccatgcctactccagttcttccttgtacaaggacaagatgaagtaccttcatgataaatatgctcgtagtaaggatttcaaagtgggtgatttggttctcttgttcaactcttggttacgtctgtttccggaaaagcttaagtcgaaatggagtggaccttttgaagtggtatgtgtgatcccgtttggtgcacttgatttaaagaacaaaaatggggaagttttcagagtgaatgggcatagggtcaagcactacttcggcaaaactgatgatagccacatggtggcacttcttcatctcaaatgatttgatggtaacttgcgtcgtgctgcgacgttaaatcagacgctttttgggaggcaacccatgtgtttttcttcttgtttttctttgattttcattgtaatataggatttatttttaggttgaccggttgtgagatgttacatgtttgtgtttatgcagtgcggcatatggtggaaaaattattcaagtctctgaagttttcaatgcggaccacactacattgtgtgcggccgcaaataactcagtgtggggggcacaaaatcagtgcagaccgcattgataaaggatgaaaatactagctctctgaagtttgccaccgcggccgccttgtattttgtgcggtccacggtgcctcaatgcggaccacattaccattttgtgcggtccgtggtgcaattgttcagagagtgggtagtctgaacaccacctctatgcagacagtattagcatttttgtgcggtccgcattggcctctatgcgaccgctttatattttgtgcggtccgcactgtgcaacatctgctactgtctgcatctttttattttctacaattgtgaacttaatttcttctactgatactaacaagtctaatggatgttgtttgcagacaatggtgaaacaagaggcaagggttctaaacaaccaggcaggggagagtcctcccggggagggaaacagaagatgctaagattgactccccaagcccgacaaaacattaaaaacacaaggaagctcactaaagctgctgataggtccattgaccagtctgggagtgaatacgagccctcccgagatatatcttcagactcaatcccagagtacatccctgactggccggagagaaacagactaagagacactcttccacctttccccactgtccaagcgtcagtaaatgtatcttctggttcgtctgagggctcagctgaaggtagtggggatgaatactccacctctcccacaacttcattatccgaagagggtgtagtaggggaagaagaggtagtaggagaagggggtcagccccaggttggtagggtagaacgaactagaaatccggaggtgtggcaagaccactttgtgagtgaggtggcctaccataaattcaaagaatggtggcctgtgaggaaattaatttcggagagaatttttgtagatagaaaccttttgcctcacaaccccaatgtgagaaggcaatttagagatagagtgggctgggagtatttcttaaacaattgtgaggatgcaaacgagcacctagtcaaggaattctacaccaatgttgcccacatcaagaagggcaccaaagtgaccaaggtgtgcaatttgaaagtgttgtttgataggaaaacaataaatgactacttggacttcgatgagaaggatgagtcgctgtatttggaaaagatggaattaggtgaggaggtctgtccttggttggcacagtatctggcaaacccaggtatcacccccgattggttgaatgcgggagtgaaaattttgataagaagtttgaatttcgaggccaaggggtgggaaacatttgtgtgtagcagattggaccccactactcatgaaaactcactccctcttcaccgggcagtattggtagcatcaatcatggtagggtacccaattaacgtcgggaaggtgatgtctcgggtgattacacaggtagttagtgaaggtgatagaactaacccttccctagcttcttgaccatgtactttagggaccgcaaagttgaaaagcggccatttgatatcaaggtaaaagcaaaggccccgttctcatggtataacatacagggtgatgacaacccgaaaggcaagaactacaagggaacatccactgatccaactggcaagtctgaagagccagttgtggtagtggctcctactcatcttgcctccacctcaatggacatccaccctggtccatccattttagcagctctagagataccctctacctcggctcatccagtgactgcacaatgtctaagccagacccttcttagcatcaacagttggatgcagacagcttcctctaagttgtttgccctcactactgcagtagcatctcagtcgacacctccacctctacaggtcctacagtctatgaggatgccctcaaggatattctggacaactagaaaaaaattcttgacactcaaaaatttcttacggacgctgtggagtcatatggaaaagctctcaaagagcttgctagggaggccaagaagatgagaaagacgcgggcttccaaggagtccgtgaaggagttgagggttaaggttgataggatgaaggcagaaagacgctttggatttattgctacaagaccctgtgccaacatctcaccctcagctagagcagtcccagaggcctcccaagaggaagaggatgattccccgagcagatga

SEQ ID NO: 82 - DNA, 4252 bp, Nicotiana tabacum
tcagagataaggagggaatatagaaagcttgaacctttgggttttagccccttcttgagtttgcttgtcttttttggcctgtatatcccgggcagattttgctgtttgcttggttgaatttcgcaactccataacttggaggccgcgtatatcagccaagccaatggggacctcctcaagtttatcacatgatacgagaacaagacgcttaagtcttggaaagtgatcacttgaagcattccaagaagctaaatctgacctttcgatccataacactagtagggaacgaaaacctccaacttttggttcccagtattctcccttaaatgcattgtctttcagcttcaagacttcaaggtactctaactggcccaatacagacatatcatcccactccaaccaggtatctaataatgttagcttcctcaaatttgtcggaaatatatatgttggaggaaggcgtaattgtttcccactttgaccaacatttatcagcttcaagttctcaagacattgtagcttcttaacattgttgaacaattcggacttatttggttccagaagcataaagattttaccacgaatgcccagttttttcaagtttggagcccttgaaaaaacttcttctgtgcagctttctggtgcaattgtggagagagtttgtaggcattgatttaccgaggtaaccttgctactttttggggcaacaggcgtaggcaatttagcggacgtgttagtgtgcagatgcctcagccgtggcatgttccatatgtctgcttgaatatcaagattgctctgttgtgtgttaacaatgagggtttgtacgttccatagttccccaatatgtttaggaaggatcttgataaagtcagatgagaaagcaatatacctcagaaaatacaattggaaaaactccctgcaaaagcaactgaatttgatggattcagcatccaacacccttagcaatggaaagtcttttggtatgtttgggatgtcaaccgggggcatgtcaattttttctgaagaaaaacataggaatgacctaacatgctcaccagagggcttcatagaaatgaattccagaactgaggaatgaatgcacaagcggcggtaggtggatagttgctgtatctcacgagcaaattgcccaacacctaattttacctcttggaaaagattttcttctgttgtggcctcttgccagcaaaactcatgcaacatgtcatgaacacgacatgttttgatttgtccatcagacgtcctttgaattatcatcactaagtttctgttgacgagatcattcaagtaatcctctgctttacgttcaagggataagggccctttgtattggatgaagccttcggcgatccataaacggatcaaattccaagcagggatctcaaagcctctgggaaatgcaccacaatacaaaaagcatgctttcaagtcgtaaggcaaacgatcataactcatttgcaccaattttattacaattctttggctggtttctattaatgaggtgttcaccaacactctgatccacttgctcccactcccttgttgtcttgcgtttccctattagagctcctgcaatcaccacaattgcaaggggaagtcccttacacttcctggctatgctctgtccaggtctttccaattccggaggacatttagccttgtgaaaaactttcttctctagcaacatccaactttcctcatcgctaagaaattttaaatcatgtggagtattgttgcaatgatgagccaccttgtgatctcgagtggtcaacaatactctattgcactttttgttgttcgggaaagcaatcttgatacgttcccacacatatattggtattgttttgtttttccggtgaatttgctaatgatgttgagatataattctcttgtcttgtatgattgcgagacataaacccaaactcgagtaaagaactcgtattcaaccttccgatgcttgaaaatcttagttgctagtgtggttttgccaagaccaggcattcctacaactggaataacctctaattcatctgatctgtcaagaagacggtcgattaccttctgtgcctcctcatcaaagcccaccacatcatcttcctcaaccacgggaggcttttaaattaatatcaaagatgaagattagacatatatatgaagttaacgttcattggcaagaaaagaaacattatattcaaccaaaacatattgtattacgtacgcatttgtgcagcttaattaaaagataggtgattagctttgttttgtattggaaaaattgatactcagtagtaaatagaagcaaaggtggattttcccaagacatatatagaacactaacattacaacaatatagatattgtccaagaaatgccacacatccttcttactttcacatttttacgatactcattttgttgattatgtcggcttctcatataaaattgataatcattctatgaactttgcgcaggagtatcttcctgtgcaaagtatatttaagtgcaatacagttccgttgattgtaccattatattctgctggaggctcaatggagacatctgaattggttatatttaagcagcatattgtcatctaatcttactcaccttcattcttattaaggagtctaaacctgttaaatatatatatatatatatatatatatatatatatatatatataaatgcaatgctgggtttagggctgtgcatttggatcggatatccgagaatccgaacccatccactctctttagacttattttttcttagtttatatcgaagtctctctctaacttctcttcaaattgctcttttcgcttctcttttttttttttttttttttaatatccctcccaatttaggaggatctatagtgtttccacccttctcctccagcatgactcgaacccaggacctaacggtcgtgggtagaggtgcttttatcaactgagcaagcctcacttgttagttcgcttctcttaagtcttatctttgtgtctctcattctcagtatctccttcctatcgacggacaacgacgatggaaatccgataacgcttttctttttattggtatgccgcttcgcgagcaaggagcgagctaagtaaatcttacctgaaaatgagcgagattcgattctttttcctttgtagtttttgttttgtcatttctttttccttccctctgttaaacagctcagcgacttgggaaagagcttgcccaccgcatactgattgatccgataaagcaaagcaacctggcccacagctctgagttggggcttgattcccagccgagataacatttgtttggaattttagtttattttattttgctatggagctttgttttgtctattgctataaaagacatttgttgcctttcaatttaagccttataaagtgtagtagccgattagattgttagtagccttaataaggcatactatctgattcgaaaatccgaaatatttacccgattcaaactttaaaatccaatccgatccaatttaatttggattggattcggattgcattttataaaaatcggaatccgaatttacaattcgaaatgtgttaaattcgatctgatccgatccgacccgactgatgcatagccctagctgggttactgcattcgttgtctcattgacttgtggtgttgagttacatgctaaaattttacatgataccaacaacaaacatggcaggcaggggcggagctaaagtgttccgagcgggttcggcgcaaattaagggcaaaaaatgaatgattgaaggcatatataatataggtacctttctgtcttccacgcctctgttggatggatcatcatcttgaagagcttgaaggccatgtgcattgttcagacggatttctttcaccctatctctgatacctttaatctcaagggctacatctttcactcttttataatgcgcaatgtccacaaacctgcctacccctttgtccttgtgaagctttgcctcaattacaaacttatcaatagcgtcttcagaatcattcgtcacttttctgatactcttcaccaattcttttagaacttcgttatcgctgcgggacttgtctgcttgcttcagaaacgcattgaactcactcaaatcttgaagcagattctctgcctcacctttcactccaaatattagctctgtattgtccctcaacaactgcatcaaattctctaccagaaaattcactgctacatcagccat

SEQ ID NO: 83 - DNA, 916 bp, Nicotiana tabacum; identical to SEQ ID NO: 80

SEQ ID NO: 84 - protein, 220 aa, Nicotiana tabacum
MRRSRRTSNLFPLDPEIERSLHRERKELEARYKTERELGILVQPQPIVMAGNGGRSVIEARRPNLANMTQAIVKPDITDYFELKQYTVQLIQSTRQYVGLSHEDPQRHIQNFLEITDTYNFPNVSKDYVRLTLFPFSLLGEAKEWLQKEPANSIHTWDDLSKKFLIKFFPTKKTKPLRSQILGFQQRDGETLRQAWERYKKLLRDCPHHCQTDDIGPYFC

SEQ ID NO: 85 - DNA, 425001 bp, Artificial Sequence
  Description of Artificial Sequence: Synthetic polynucleotide
ccaagttggcctcatctgcaagcaaaggttaatttcctcgatcgtggccctttgagacccatcgaaagctttcacgttcatgcttcctgcctgtatttcatgaaaacctttgtccagtgttttcagagtagccaatggacaaatattgaggcttgatcctccatcaaccaaaaccttggcaatgaacttgtctttaaattgcattgtgatatgcaatgctcgattgtgattcaaacccttaggcggtagctcatcttcgtagaagatgatcttatgactttccagtacctgccctaccatattggccatctctccgccggtgatgttgttgggtacataagcttcactcaacaccttcattaaagtattcttatgcgcctctaaattttgcagcagtgacatgatggatatctcagctggggttttgttcaaatggtcaatgacgaaatactcctttgcttgtattttcctccaaaggtcatctggccctatttcaatgataggctgcttggtagtggtatccttacttggtcctcccaagtgttcaggggtatagactcttccggtcctggtcattccatgtgcagcatcggattcttctgcctttgccttctcttttcactgagtttcggcaacataatcccaagatattgcttttgagtggaaataaggtgtggttgatactgtcattgtaaaaggtgtgacaacttctacttgaaatggagcaggggtgtccgtaggcagagccacctctacctcaaatggaactgatgcggctacctcaacatcgattggtgactgagtctgtactactataggagtaagtgtgaatgaaggtttaaagtcatcgccctcccgaataaacccaatcgacccatcagggtcccattcttcgttcgtctctatcacatgtaccccactacctctatgatcagggagagggttgttgcgacattgggtgcagcttcctttgctttatcaattagcgtctagatcttatctttcaatgttcgggactcatcagtggtgtgccccttcataccagaatggtttgcaaaagttttgtttgggttaatccattgggatggattttctaatgccacagtgggaataagggtgatgtaaccagcaactttcaacctttgatacagttgatcgatgggttcagtaatggcagtgtattatctgggtggcttgcgatcgaagcttggtcgtggtcttggaaagttttagcgagttggaggtgattggaaatgggatggttgggagttataggtatgatggacagtggctagttgggaatatctgggagatgatggttgatatgtgggtggtggtgcttgatatatgggtgggggtgtttgatatgtaggtcgaggtgtttgatatgtgggtggaggggtttgattggtaagtggagattttgggccctgggccaccattactaccccaacgtctcttttctttgatatgtcgcctgattgcaatgccttatttgtggcctgtaatgcctcaaaatttgtcaccatcccgcttttgataccttcctcaattctttccccaagcttgatgatatcggagaatttatggttttcaataaccatcaatcattcataatactacggaacctgtgctctgaagaagaacttgttcatctattcctcgtccaaagatggcctgaccttggctgcttctgacctccaatgagtagcatactcgtagaaagtctcggtaggtgtcttcttaagattctggatgtagaagacatccggtgcattctccctattgaacctgaaccggtccatgaaatccgatgccatactcacccaattggaccatttcttggggtcttggttgatgtaccaggacagaccatctctagtaagactcctcataaagagtttcatttggatcttttcgtcttcccaaccctgacaagcttgtcgcaatagatcctcagatggaccctgggatcacctgggacccttctttgatggagggttttatccttccagcagttctacatttggctgtatgcataggtcttcatagtttaaaccttctattcccttgtcgccttcgacaccctaaactcgactcgtcaatttcttgagttcttcaaccatgttttgaatgagcaggtccttctcagattattctggggtataggagattggttggatagagtgaggcacgatttccacgtatatggggttgttttggtgagtgcccggtgcctgggtgtagtggtggtcattagtagagttttgagggtcaggaatgggttgtggtgtattctggggagtatgataagtggaggttggtgggtaatgaattggttgatgatggtgttgtggcagagttgatattggtatgggattgagattttggggtggggttgcgtattgttgcggtgcaggagggttttgcggatgttggtttggtgtgttttggggaggtgctgggttctttgtgctttgctggttgatgtcagggatgttcagagtgagtgacaagtttgcgaagttgcagacctactcaagatctccttgtagctctaatatcttttgttctaacatcaagactagatcatttggtgctggggtactccgaccgtctgatgtttttgcgttctcaacattctcctttcggataccacttaaatcgtccaatttttcttttcctctatcttttgtattacttggaggaggagggggtggagggcctctagatcagatgtgatatgctgactatgccagtatgagcgaaccaaccttaggggataggaattagaaataaagaaaaacgaaagtgtaaataaggcagtaaggattctgaaattcttgcagtatttaaacacatattacgagaatgtaaattcgtgtcctaatttgggagcctcgttgtgcccgaggtaggcctagtgacaaataaacttggagaaatttagtgccaataattgactcatttcattaaagtaaaagtaaacgaaccaaaacaaaactaaataagttaatgtcattactggctcttggccttattatatttgaaaggaaagcaaataaatctaatatacctggtatcaaaaggaccctctccaggctgaatgctcttgtcgattaattcttccatcttgcgtaggttcagcagtaggaacgcccttgcaagatgccctccttcgttcccttcagcattctagcagtcggtgaccctttttcttagcttcccttcaaactccattaaactgtattccaggtattccagcctctcgctggatttaatagctcttcctttccactcgttaattatctccatatcatccttgtgtagtgccatatgctcagcttcagactctcgaactcttttccgtagcttattgtacttcacctatgctttagaaacctcgtctataaccctatttcttggctcgaccctcggctcaacgaccccagttatgttttcctctaaccacgaagtaaaggtatgagtggcccgtatggtatcggtctagctcaatagtatccttttccataataattttcaagatatacatgtgttgtgattcattcttatacgggatggtgtcaccttggaaattggctttgaagtggcacattttggcaacccgtggtatgatttgtctccttctttcttgtctcataaccttgagaggagcgtaagggtatatgcccctcaacccgatcaacaccaagtgctgaaaatccctggatctgatgatgaattcatcggtaaggaaccactcgaacatccacttgacttgatcctcagtcaaattttcaaaaatctgtacccatcctgcagcgtcctctggctgagcaaacatatctagaatataattcattcttttgggatgatggaaggctatatgatcattccacggccttcgcagaaattcttgacaatattgtcccttttggagatgttccaacaaccagaattgtagcagcaagttgcagccctcaaagaacctgaaccccttctgacatcgctccaaagtccggtacatgtctgcaacaatcatagggacgatagtgtatgtctccccctcgatcttgtccatcagagttttggttgccatggccaacctagtatggatcctatccccttggattgggaataccagcatgcccaagaagtacatgataaatacgaagaccctacgatgaatccaacctaaagaagtgattgagaactcatcatcaaagaggcggtaagaactgttatgactgtatctttcataaaggaacttaaaaggaatgtaggagtcctttaggaatttcaagttatcattcttcttcagccctaccatcttcaaaaatcccctagcagtgcgattttcaggcgccaacagattaggactatcccaaagtaacccagcaaattaccctatttcttctagaagggtgtcatttctatgttcccaaaatggaacacaactctttccttgtcccaaaacatagttacaacctcgatcaacattttcttgagttgaaggtccatcaaagaaggcaagtttcctaagactcgtttcacattgttttggtcacatgaaggaagattcctccaccaatctagcaaaagtgagggtgtgctaaccataccgaatctggggacctcgtgcctcatttttttcaaaacaaagagagttaggccttttccccctccaggtttgtctatttatacagtaatgattagcatattgacaattatttctccaaattaatgcacacaatcgtggttacatctgttgggattatggaaaatccgatggacttttggacaaggctcgtcttaatgggttattatgtggacaacatattaacccgactaggtttgaccatgatacatgtacaatttaatcaaagtagggttgctatagaggtatagactaggaccctcaaacggacaacttgagggggaaaggaacggaatcgtcgaacgcaccgctgatcgactagttttaccgcaaatacgactttctgaatttaaagggtgatatataggaagagcgtaaacactcatcaagcattgctataggattaattacacatgagtggagtatgatgttgagcatgatttatgtagcaataaatcatattgtcaagtatctgcacgtgagaaaataataaatgcaatatttaaataattgaagagacagtacagaaaaagaaaataaggagacaagtcaatttcaggaataaagaatgataaatgcttgaaaatagacagttaagttcaaataaggggaaaagggtatgtgggatagagcatgcttggactaattcacaaaagataagttcgttatggtaaaagcctaaaaatatccccagcagagtctccatgctatcacacccccttttttccctttttaacggggaagtccgggtttcgacattcatgggggaataactcgttttcttttgggaattgagtatttgcagagtttccacctaatggattatggtacgttagggcaccttgagcaattaactcatggactagtttgcattaccagagatttagggtaagggctcgaaataaccttgaggggaaggtattaggcacccctcgcggtccacaacggtgggtcccggccgaacgtaaactatgtggattagtcattctaacaaataaacagtttttaacacgtacttgcaagtaaaaggcatgttttgacattctaagcatatgtatgattcaagtaatggaacaagggaaaaggtttgaacaagttgcacatatataaagaaaattaaatttgtttaaacaacgggagttgggaaagaggggtcctaggttgtttagcctataggatcatacccacacaattcccgataaacactcctcaacaaggggatacacgtgacattagcacgtagtcatcatattccttactacccaattccctccccttggttatagcctaaaatgttctagcaaccttgaaagataccctatgcgtgcactacccgtcccttcctcgtggccctggaggtatttaggaactctaatttaggtagttgtagaccatcctaaggtttttaaaggacaaaagtgtaggcgtcaatcaaaacaattaggactgcatttaaagaggaaataattaaaggctcacatttatctccacaaacataacaagtaagtgtacgtatcaaacaacagtttaaagtatttaagagaaaatcctagaacatgatatctaggtgatcagagattatacagtattgaattagaatcaatgtgtctaaggacctattcggcttgcctactggttttatacccgttgaatgtgagcagtcttaaataacaaagcgcaattttatagttgcaagatttttaatcgccctagaggctttcctaggtgtataatagtgatgtcctatgaacatgacatctatattgattaggaatatagaaaacagtaagccgttttaaacgaacaacttgagatcctataggcatgctttctaacagtattaatttaaggcaatgttttgaaaacttattaaagaagcggacatattgattaattaaaccgattcagaataaacaaacatgaattgaactgacttttctaactaaactgttttaagtcttataggcatgatttctaattgagcaaggtaaaacaaacaacattcatttaaccaacgtgagacccctataggtatgatttctatagagctgattttaaccctgtaagcacgtgatttttgccctatatgagaattactcccaaaaaattcaaaaataaaataatttttctaggtgtgcaatttttgtgatattttgtgtaactatttgtatgtttgtctgtgcatgtttatttgttaaattattaaaaatacaaaaatatgtcgcattttgcatgtaggatttaattctacaatttttagtaattaagtttgttttacaaaaaataaaaatttacaaaaataggcatcgtttgtatttttagcatttaatgtccaaatatacaattttatgcttaattattacttaattgtgcgttaattgttatttggagttaatttgcgcttttataacttaatttagttcttaataataagttaagtatttttataatttagttttagaaaaaataaaagaagaaaagagagcgaaaatataaagaaagtcggaattgggcctcttctttgatttcaagccacaggcccaaaaaatgacccaatcttcccaaacgacgcagtccattttgaactgggtcgacccagtccagtaccaataacccaactccccctcttcatttttcatttttatttttacaaaacaaaaaaaaatgaagaaaaccctaaaaaactaagaaaccatccgcccccccccccccatttttgcttcttcttctccaaaatatcaaacaccccaaacatccatggcagcccttctgcctccccatcgacaacacatacacacacatcaaacacaaacaagctccaccaccctcgcatccaaatagaccccgtcgcgtctgccttcatcgtcttcgtcgagctcaagcttgagctcgacatccatggtcgcctctgctgcttcgtcgtctttcttcggcaccaacgaaaacgtcaagatgcatcgacttcaaaggattgcttaaaacagtccatcgccgagttcatatgctgtcatggctgatgcctcgccgtgcctcggctccttcatcgtcttctgcttcacctcccatgctgccgcgtccagcttcgacgagcagccatggttgctccaaacggatgttgctgctactatttcagtcttcttcctcatcgacgaccttagttgttgaacgcagcagcatgtcgacgaccatagttgcttcagctgcgtcgaccactgccttcctgcgaccactcgtttccatggctgaaaataggagaacaccctcgccatggccggtcgctactgctgctcacgcagctgctactgcgtcagccttctgctccgcctcccaactgcttttgttttgttcgctgctgcccgcaccctttagtcggcgttgcttcagtttgcttcttagattcgttcgtcgtcgtttggtcgagcttttgtcgaggtttgtcgaaacagtccgtacatattcgtttcaatccggtgagtatattttgagttttattttgtccgtatttttgttttgatattttcgaatctaaaatcggcaaatgtttgttttgttcatgtccatcgtttgaattaattttttttagtttgttcatgtgctttgttaaattaatttttcagatttcaaatgaaagataattaattgtttttcatgttatttcatgtttgtattgttgtttagataaatatttgttagtttaatgtttgatagattcaaattgaaatttaattaattatttcttcaatttgtttcatgttgttatatattttccagaaattattaatgttgtttgagtcatttaatccgtcatgtttgttgttttaaaaaaatggattcattcgtgttcatactttgtttggttgatcttgaatccaaaatttgtatagtttgatttcttgtttatcatttatgattatttcttgaatttgtctcataatcttgtttaagtttaatataggaattgttggttgtaatgttgttagagttgattttaagttcaatattattgaattaagaaatctaaatatacttgtttgttgttattattgttgaatctgaaaataggttgtttgttgctaaaaaaaaatattgttcaatcaaattttagttgttctttgttgttcaatttgtgttcatgtgatttgttgttgaaatgttgaagaaatcatgttcatgtgatttgttgtttaaatttctgtagaaattggtcatattggctatattttggttgaatgtgattaattgatttgttatagctgatgggttagtttggtaatttgcagtacgttcaggggtagtttggtaatttcagtaaggtcggaggggtagtttaggaattgtacatttttgtaattttttatgtgaagcatgggggacaaaatgtaatggggtgagttgtgatataattgtttaatataaaggggggacaagacaaaatttagtggggaggaatcttgtatttgtttagtgaaagcatgggggacaaaatataatggggtgaggttgatatatttatttaatgtaatggggatgaatgggaagataatgggtttggtaggagaaaatgggttaattttaattgattaaaagatttatgggatgagattatatataggaagtcttgaacacacaataaggatggacagaagagaagaagagaaagaacgaatctgaaataagagaataaaaagagacaaaacagaaaaacacaaggggagagaaaaaaaagagctgaatatttaagagagaaaaattccgaaaaatattcaaactttcaaataaaaaaaaatttaacaaaaatcttcggctttctttcattgtttgaaatcagcattaattgttgttgtttcataaaagttggaagcatttgttttgggattactactccaccggtgtgttactgggttgttattgttgctgggctgttgttgctgtcttgtactgttattactgctgctgattctcatcttcattttcttttgcttccaatatcaggtacacaactgacacacaggttattgtaatccgaatatgaagcatgaatacgaaaaatgaagaattgaaattctgaattatatttaattatattctgaattttatttgtatgtacaaattatttagcttgcaaaaatcagaatcatgtagctatttaatacatatagtggaacatccgacgataatttaacatatgaactatctacatatattgcataaaaataaataaatggtgtagtaactccgtcaagtaaaaatcaaacgaataggccatctagtaggaacttggtagaaatattgtttagttaaataatattggttaatttcagcatgtaaatggtctaggattaaaattagattgctatttttttaaatttgacaaactgagaacatgcctagtataatgtaactaggtaataacatgtaaataaattaagatattttctcttttattttgtagagacaaatttcaaataaaaaatgtaggcattttaggactgatttttttaaaaataaaatgagatgagcctcgcccaataaaatgcaccaattgcggggccctcgataaatgtttaattgagtaaatagaattcgggatagactgtttagtgaattccacggtcttacccataaataataatacgctaatcgctttaggcacgattttaacaataatacattcttaagcacgggtgcgcattcatgcgacccaaatccaaatcccaaaacattgaataaaatgtgttccggattgcgggtgcacttcatgtgacgtaatccaaagacatgttttaaacaatgttcacattcttgtaaaaataaaataaataatgataaaagcggtaaaaagataaaacttgcacataagttcatatttatataaaaatcagataatcaagccgaatataacagttgagcgaccgtgctagaactacggaactcgggaatgcctaacaccttctcccgggttaacagaattccttatccggattattggttcgcagattgtaatatagagtcattcttttcctcgattcaggattaaaattggtgacttgggacaccctaaatctcccaagtggcgactctgaaataaataaataaatcccgtttcgattgtcctttaattgaaaaaaaactcccttgtaccctagcggggcggaaaaaggaggtgtgacagctctggcgactctgctggggacaacaacccagaatctctggttcagggttcagaattcgagcttagataaattgttgtattgaattgtatctgattttcctacatgttttatgctaaatgtgctaaatgttaccgcttttatattatctgaactgtatataaactgtgccgacacccttctctcttcacctccggggatgcgcttactggttgagactccctattctgttagtgtcataccttgaaataagaaagaggtcggacaagttacgaagtcggatggccttttggttcccggtaagttgccccctcctcgactcgagttgtccgctcgggtacacagtctagtactccgactcaggttttgaacataaaataacatgacttcatgccggatccctagtaggaacgattatttgcatcatgttgcatttgacttaggggactcaacacaggggttgggtctgtctagggctagcaacctgaaatgaaaaagaccatcttgatgcatcctatgtgctacatgttgcattccttcaagggtaaaagtgtcatttggcggaccaatgataattgagagtgaatgaaaaggaaaaaaaaagagggtgaagtgcgaagataaagcaaatagggcccggttatgttttgttacatttttatttaaaaaaaacaaatttaaaaaaaaatgaaaattttttaaaaaaaaattctttgcactttttatcatttttgaaaaatcaaaaataaaaaaaagggaaaagaaaatccaaaagattttacatgtttcatcaccttttaagaaaaagcaaaagaaaaaaaagatatgttttctctgaattagttatttttttaatttctcacccgtatccaatcggcccgaactacgtgggtttgattctcaccggatgtgagatacgtaggcaaccctcatcgggtccaaccccaccttttgctaaaatagccaaaaaccaataaataaataaaaaacgtgtcaaaattttaattttgtcataaataagtcgggcggtgtccaacctccccttttgctaaaatagccaaaaaaaataaaatatgtcaaattttaattttgtcataaagaagtcgggtgacgctgttttatcaagacatagccgaatgttcccgaaggggacgccggaaggctgactttgcataaacagccaccttttgggtcatgtttaggatttttggtccagttgacccacacaaccttaaaaatctttgtccccgaagcgttgaaaggtcgtgtttgcaacaccaggtttttattgtaatttgaaaaaaaaacaaaaaaaaaacaaagagtgagcggtcaggtatttttagtcaaaaataagccaagccagcttcgaccgcgtcttaaaccgttcttgccgaaatagccttagagtatctttcagtcgttgaaaggctattttcgtaaaagaatgagaagtttgtaaagtgtcataaaataatcctccccggcctcaaaattcatatgaaattgggaaggggccacatttgagaaataaccgtttggttgtctttgccaaacgggaaaagaagctggtcgtttgtttttggagtttgtaaatcttttaattagaatatgtgggttgtttgatttttgagtttgtaggtcatcttcaaacctttgaaacccagttttgtttaatatgaaaattgaaaaaaaatgattagtattgtttatcttttattggtccgaactacgcaaggtctaattcatgcggggtcatgatacgtaggcaatctccataagattcgaccatgacaaaaaaaatatgaaaaaatttttgaagaaaaaaatcaaaaaaaaaatcaaaaaaaaaatcgaaaaaagaagaaaaatgaaaaaaaagggaagagtgttgttaataatgaggaccgactgagtccattctaacctgttttgctttgaatcacaaagaaagttaggtggttggtttgtggtaagccggaaatacaagacccagaagcacactttgcggggatcaggccttataacagaagcactcgaatcctattgggacttgttgactaaggttgatgatatcgaagttggaaatggtctggacaatactgatgcaaaactcagtggctaaagatgtcaattttgataaagtgggaggacactccgttccttggttagcaaaagagaagctggtggtggcttattttgttgtcatttctgttgtccggattattcttcgggttgtaatccgaatatggtcttgtgtcaaaccttcttatctttccattttgtcatatcagtttgtttaagttttgtctaggctattttaggattttattctggtttgttttgtttgttttattattcaaaccatttcgccggtagtctaaaacaaaagccggtctttattattttcagtcatcctttttgtttagtccttttatcatttttgttcaagcgccgattctcgtgacatgacatgcgcacacagtttgggcctaatcttaaaatgttaatcataaaaccctgggaagatgatcaaagcatttaaaggaaataagaacggtttgagattgtttgaagcccgagtcatgtgaaaccggggcaagtaaaacataaagaaaaccgttaaatgcaagattcgccaaattagcatgagggtcgttcatgagagtgagagtgtcgcccagcagtgctttaatgacaaatgaaaaagcaagtgtttaacataattgtcaagtccagcaccatcggaagagactataaatctatgttcaattgtgtcgtttgcacttggcatgttttgaagactggaatgacgaaggcattttgttctgctacctaaacactttatccttcgttaccccttttgagccttatttattttctttcataccccttgtccggaatcaatagcaacgactaggaaatacgagcctggaaggtaaagaaaaaaaaatcaaaaaaaaaattgataacaaaaaaaaaacaaaggaaagtcaaatgaaaacagaggaattgggaactacgtttgacctgattcctcaaagaggatacgtaggcttttcacggctcggtcatagttttgaaaaatgaaaaatcaattaaaatatccctaagcaagaaactgggacaaaggttgcaaataaatctagtttccgaaagttgtaattttgaacccagaatttattttgtatttttgagccttttataccctttctttctagccctatccaaaaacctacattacggtccaaagaaagaccttctgatcagttttcaaaagatgctaagttagacaaacgagagtcttaccggcgaacataacattctgttccacagcagaaaggactctaatctccagcagagagggtcataccggcaacactccaaatccccagctggaaagtgatacaaatgagagagtcttatcggtgaaaaccttcataggcaccataaggcgatgaaagctgagagaaaaaccaaaatgagagaggcttgatagtgaaaacccttcgggcactacaagtcgaataagattgagaaccagatgaggaattgccaattgaaggtcttgaaagacgactgacagcagaggataggccacatgtgcatgtcatgaccattagagtcggtatctgcgtttgataggtttttatttaaagtttcttttgttaaagagtcatcgttttcctttgtcttttattctgttccttttatctttttcctttcatagaaaaattccccagtagagcctgtttggtcaaaaccagtgggaaatgacttcaaaatgggccatcaactctccaatcatgcaagatgagatctgactagtacatccaagtggtatagtcagcaaggaacaagcgcgaggccagtgtcaaaaaaaaaatatccccagcaaaagggagttgacaaaaggattgacgagtgtcaagaaggatatcccagccgaaatcaaaggttgttaaacctcaagaccaaggcctgtggacaaagcaaggagagcagtgagcatgatttgggaaattcatacgatactaaaagatcggtgaagtgcaagtttccaggctatgtcacaaaagaaagggattatccccagcaaataatatcatccccaacaagttgtggaacaaagagcaaggaaggagaaagggaaaaccagcccaacaggagtatcacaaccaaccaccgcgttttgaactaacaaattttgtttgatttgaaacaggtaaaggaaatggcattgatgacaaaaatgcatgccacaagggatgttgtcaaactggggcagaaaattttcttttcatttagaaaattttctggaagtcaggtacccattcggggaagaataaagataatgccagtctcaagggaagtggtcttagaaccagtgttgcccccaacataataagtttcaatggaggaagttgttccccagcaaagggatgaaacttgagctcagaaaaagcaagaggccagcatcattcccaacagcctttcgaagagtgaagcactagttctgaaggaatcaaaatcccccagcggtgttatcctcgacagtgttatccccagctgataatattttaccccccaacaggtaagtaaataattccccaacagtgttatccccagcagtttcgaggagtccaacacaagtttgatgaaagtcggtatcctcagcggttcctttcggggaaagacaaaacgagtcttaagggaggtagtcttcgaaggaagaagctatgcaaaaaaaaaaagagaataaaaaaaaaagtttcgggcaacctagagtgggtaagtaaaaaaagggggaaaagtcatccccatcaaaataatccccagcagtttcgagggaagacaacacatgtaagtaaataattcaggaagaaggaaatggttcacgcataggaaatgcatttcctcctaagtttattttttttacccataggagatgcatttcctcctaaagtttagttttacccataggagatgcatttcctcctaagtttatttttacgcataggaaatgcatttcctcctaagtttagcttcattcataggagatgcatttcctcctaagtttaatttcacccataggagaggcatttcctcctaagtttgtttttacccataggagatgcatttcctcctaagtttagttttacccataggagatgcatttcctcctaagtttgtttcacccataggagaggcatttcctcctaagtttagtttcattcataggagatttcctcctaagtttaattttacctctaggagatgcacttcctcctaagtttgtttttacccataggagaggcatttcctcctaagtttgtttttacccataggagatgcatttcctcctaagtttagttttacccataggagaggtatttcctcctaagtttagttttacccataggagaggcatttcctcctaagtttagttttacccataggagatgcatttcctcctaagtttgtttcacccataggagagacatttcctcctaagtttagtttcattcataggagatgcatttcttcctaagtttagttttacccctaggagacgcacttcctcctaagtttgtttttacccataggagaggcatttcctcctaagtttagttttacccataggagatgcatttcctcctaagtttgtttcacccataggagaggcatttcctcctaagtttagtttcattcataggagatgcatttcttcctaagtttagttttacccctaggagacgcacttcctcctaagtttgtttttacctataggagagacatttcctcctaagtttgtttttacccataggagatttcctcttaagtttgtttcacccattggagaggcatttcctcctaagtttagtttcatttataggagatgcatttcctcctaagtttagttttacccataggagaggcatttcctcctaagttgttgttgaaatcaggagtccgcctggagaatagagacattcaattttcaatttagcaatcaggctcccacctggagaataagggaatacagttgaagtatcagcaatcaggagcccacctggagaataagggaatacaattcaaattttaagtaatcaggagtccgcctggagaacagagacatacttttcaagtctgatgtcaggagtccgcctgaagaacggagacacacagttcaagtattggttgatgtcaggagcccccctgaataacagaatggcgatttattggttgaagttgggagcccgcccgtataacagaggaatacattcagcattaattttcaagtattgaagttgggagcccacccatataatagaggaatacatttcagtctttaattttcaaacattgaagttgggagcccgcccagataacagaggcatacatttcagtctttatatttcaagcattgaagttggaaacccgcccagataacagaggcatacatttcagtctttacatttcaagcattgaagttgggagcccgcccatagaacagaggcatacatttcagtctttatatttcaagcattgaagttgggagcccgcccagataacagaggcatacatttcagtctatttcatttcaagtgttgaagttgggagcccgcccagaaaacagaggcatacatttcagtctttatatttcaagcattgaagttgggagcccgcccagataacagaggcatacatttcattctttacatttcaagcattgaagttgggagcccgcccatagaacagaggcatacatttcagtctttatatttcaagcattgaagttgggagcccgcccagataacagaggcatacatttcagtctatttcatttcaagtgttgaagttgggagcccgcccagataacagaggcatacatttcagtcttttcatttcaagtgttgaagttgggagcccgcccatagaacagaggcatacatttcagtctttacatttcaagcgttgaagttgggagcccgcccagataacagaggcatacatttcagtcttttcatttcaagtgttgaagttgggagcccgcccatataacagaggatcaagtcagaggacaataaaacagagggttacaataggaatccccagcaggaaacaataaaattccccgacactgggaagcagaaggttgcaataagaggtcccagcaaaaactcaaatgcatgtgtcgaaaggaagaaaagcatcggaagaaaagcaccggaaaaaaaatgcaacagacaagaaagcaaggcaacaaaaacaaattgcaatctagcctagcttcttgttttcttttaagcacagtgtaacaaggagatcggtaagcagtagtaatagcatgcaacaacagtaacattgcagtcccacggtagtcccagctaccaaaacttcccgaactacattgacctgattcctgtttagcccaggatatgtaagaaacctttgaagcaaaggttcggtcaaatctttttcaaaaaaatgcttcacacggagtactcggatgggcaaaaatcgctcgctttatctttgcacgaaaacccttcgtgtcttcgggcaaagaggggcagctgtaaacacgtgatttttgccctatatgagaattactcccaaaaaattcaaaaataaaataatttttcttggtgtgcaatttttgtgatattttgtgtaactatttgtatgtttgtctgtgcatgtttatttgttaaattattaaaaatacaaaaatatgtcgcattttgcatgtaggatttaattatacaattgttagtaattaagtttgttttacaaaaaataaaatttacaaaaataggcatcgtttgcatttttagcatttaatgtccaaatatacaattttatgcttaattattacttaattgtgcgttaattgttatttggagttaatttgcgcttttataacttaatttagttcttaataataagttaagtatttttataatttagttttagaaaaaataaaagaagaaaagagagcgaaaatataaagaaagtcggaattgggcctcttcttcgatttcaagccacaggcccaaaaaatgactcaatcttcccaaacgacccagtccatttcgaactaggtcgacccagtccagtaccaataacccaactccccctcttcatttttcatttttatttttaaaaaacaaaaacaaaaaaacaaaaaaatgaagaaaaccctaaaaaactaagaaaccatccccccctatttttgcttcttcttctccaaaataccaaacaccccaagcatccatggcagcccttctgcctccccatcgacaacacacacacacacatcaaacacacacaagctccaccaccctcgcatccaaatagaccccgtcgcgtttgccttcatcgtcttcgtcgagctcaagcttgagctcgacatccatggtcgcctctgctgcttcgtcgtctttcttcggcaccaacaaaaacgtcaagctgcgtcagcttcaaaggactgcttaaaatagtccatcgccgagttcatatgctgtcatggctgatgcctcgccgtgcctcggctccttcatcgtcttctgcttcacctcctatgctgccgcgtccagcttcgacgagcagccatggctgctccaaacggatgttgctgctactgttttagtcttcttcctcatcgacgaccttagttgttgaacacagcagcatgtcgatgaccatagttgcttcagctgcgtcgaccactgccttcctgcgaccactcgtttccatggctgaaaacaggagaacaccctcgccatggccggtcgctactgctgctcacgcagctgctacagcgtcagccttctgctccgcctcccagctgcttttgttttgttccctgctgccagcacccttaagttggcgttgcttcagtttgcttcttagattcgttcgtcgtcgtttggtcgagcttttgtcgaggtttgtcgaaatagtccgtacatattcgtttcaatccggtgagtatattttgagttttattttgtccgtatttttgttttgacattttcgaatctaaaatcggcaaatgtttgttttgttcaagtccatcgtttgaattatatttttagtttgttcatgtgctttgttaaattaatttttcagatttcaaatgaaagattaattaattgtttttcatgttatttcatgtttgtattgttgtttagataaatgtttgttagtttaatgtttgatagattcaaattgaaatttaattaattatttcttcaatttgtttcatgttatatattttccagaaattattaatgttgtttgagtcatttaatccgtcatgtttgttgttttaaaaaaatggattcattcgtgttcatactttgtttggttgatctagaatccgaaatttgtatagtttgatttcttgtttatcatttatgattatttcttgaatttgtctcataatcttgtttaagtttaatataggaattgttggttgtaatgttgttagagttgattttaagttcaatattattgaattaagaaatctaaatatacttgtttgttgttattattgttgaatctgaaaataggttgtttgttgctaaaaaaaaatattgttcaatcaaattttagttgttctttgttgttcaatttgtgttcatgtgatttgttgttgaaatgttgaagaaatcatgttcatgtgatttgttgtttaaatttctgtagaaattggtcatattggctatattttggttgagtgtgattaattgatttgttatagctgatgggttagtttggtaatttgcagtacgttcaggggtagtttggtaatttcagtaaggtcggaggggtagtttaggaattgtacatttttgtaattttttatgtgaagcatgggggacaaaatgtaatggggtgagttgtgatataattgtttaatataaagggggggcaagacaaaatttagtggggaggaatcttgtatttgtttagtgaaagcatgggggacaaaatataatggggtgaggttgatatatttatttaatgtaatggggatgaatgggaagataatgggtttggtaggagaaaatgggttaattttaattgattaaaagatttatgggatgagattatatataggaagtcttgaacacacaataaggatggacagaagagaagaagagaaagaacgaatctgaaataagagaataaaaagagacaaaacagaaaaacacaaggggagagaaaaaaaagagctgaatatttaagagagaaaaattccgaaaaatattcaaactttcaaataaaaaaaaattgaaaaaaaatctttggctttctttcattgtttgaaatcagcattaattgtagttgtttcgtaaaagttggaagcatttgttttgggattactactccaccggtctgttactgggttgttattgttgctgggctgttgttgttgtgttgtactgttattactgctgctgattctcatcttcattttcttttgcttccaatatcaggtacacaactgacacacaggttattgtaatccgaatatgaagcatgaatacgaaaaatgaagaattgaaattctgaattatatttaattatattctgaattttatttgtatgtacaaattatttagcttgcaaaaatcagaatcatgtagctatttaatacatatagtggaacatccgacgataatttaacatatgaactatctacatatattgcataaaaataaataaatggtgtagtaactccgtcaagtaaaaatcaaacgaataggccatctagtaggaacttggtagaaatattgtttagttaaataatattggttaatttcagcatgtaaatggtctaggattaaaattagattgctatttttttaaatttgacaaactgagaacatgcctagtataatgtaactaggtaataacatgtaaataaattaagatattttctcttttattttgtagagacaaatttcaaataaaaaatgtaggcattttaggactgatttttttaaaaataaaatgagatgagcctcgcccaataaaatgcaccaattgcggggccctcgataaatgtttaattgagtatttagaattcgggatagactgtttagtgaattccacggtcttacccataaataataatacgctaatcgctttaggcacgattttaacaataatacattcttaagcacgggtgcgcattcatgcgacccaaatccaaatcccaaaacattgaataaaatgtgttccggattgcgggtgcacttcatgtgacgtaatccaaagacatgttttaaacaatgttcacattcttataaaaataaaataaataatgataaaagcggtaaaaagataaaacttgcacataagttcatatttgtataaaaatcagataatcaagccgaatataacagttgagtgaccgtgctagaaccacggaactcgggaatgcctaacaccttctcccgggttaacagaattccttatccggatttttggttcgcaaactgtaatacagagtcattcttttcctcgattcgggattaaaattggtgacttgggacaccctaaatctcccaagtggagaatctgaaataaataaataaatcccgtttcgattgtcctttaattggaaaaaactcccttgtaccctcgcggggcggaaaaatgaggtgtgacaaaccctataggcacgatctctattattaaagccattttagatcctataggcatggtttctaattgtgtgggagtaaagcaaacataacaaatacatttgaatccacatggaccctatgggcatgatatctacccaatttgcccaatatacataactaccctccctttttcacttatcaccccactgtttatttacaaataattagtacaggccaatgaattgaatagaaattacatataaaagaaattaatctatagggagcctgaagtaggcccaagtgatttccaagcctccagtagtctcaaatacccaaagttacatagccaaattcatgtctaggtgtatcagagttccctaaggacctcaatgatcccgagcaatactcacacctagacctttttcaaaaataattggtttaggtgcagtgtggaaatgccagctctgacatgccagagttcagagagatctcaagggtctcaaggcagtacacatatcagaggggcaggacatagtattctaatagtaaatggaagtgcatagtggtttgaaagagtttaatagaaaggttttaggactgaaaagaacttctgaaaaccattggtgataaaatagtttgagggaaagtataaagaagcaattttgtaatcagaaaacaagacaaagatcaaacaagctttaggaagcaactttggcaagcagctttcacacaaagggaagagggattgggaagatagagagtacaccttaatgaaccatacaaacaataggatatagagagttttgagggggctctacagatgtagcaaagatcacatcagaaacatgctaaagacatctaaaccacacaactagaaccactttaaggagactgactggcttagtaggagtgaaacagaacatgcaaggacttaaatggacatactaggtaagtgctaacaagtgtaggcatgctagttacatagaagcagagtctaaaaagaaacagtagctagttaaacacgcttaagttgtatatgtagacatgttaaacaagatagcaaacatgcaagtaaagtggaagtacactaatcacaatttgaataggcagtattagacatgcttgaacaagcagtaaacagaaacaagaatggacattaggccacttgaactaaagcagtaagtaaagacataggttttgatttaaaaattaatcagaagcatacctaattaaagaatgaaaaacacaagatgtgagaaaggcagtgtgcaacttccagcctgggcttgcagccggctagaatggcaaatatcacaagtagcaaagagagcagaaatagagcctttttgagtgaaaaagtagtagttttgaactattgttcgttctccagaagttaaaataagagggagtttatatagtaatcaaaagctttaaaaaataaggcaagggatcaattaagttgcaatcatgaaattcatggaatcaatcacacatgtaaatcagtaagtcttttctttaatcacgggataaccaattaacgataaaagcctgatagatatttaaggaaaagaatcaagtaaagtttggggtatagagtaggtaattaaaggtaaatgaacagaattttctattaagggaacaatcgataagaatcgacaaataacaaaaaaggcaagggaaaactaattaaggcaagaaattcaatcaaactgagtagagaggtaagaatcaaaagttttgttaagaaaaagagttcaaatcaacccaggaaataagaacttcagaacagtcaagggtgaaatcaaagagaaaatcacgtaaagatcagcaagttttgctgacaacttaaataaagcaagaaataatagttagaataaatataggcatatagaatcaatggaaaagttgaaccaagtactcagtagaggcatattagggtaagtaaaccacgagacatctatatggctaaagaacaattacaggaaccaaggcaagaatacaattagtacacgagtactcagaaaccaaacaaagaatgtcaaaaaattaaggcttttagaataaacgagttgaaattagagaaacctaatgaaatcggttaaacatacatgaaacagaagattaaacacccaaatcatcaaatgttttttggaaaaagagatttctggaaaccctagtttagagaaagatgaaaaatcattcgaaaatcagacgatccttgtaaataatcaaaggttattgtaaaaatcatatgaaataggtccaaacatctcagatcagtatagatctaagaagttcagaagaaagaaaatatggtttcgagaagaacaatcacagagatgaagaatcaaaccaagaaacccatagatataggaatatctcacttggaatcaaactaggacatgctgaaataggcgagaaatggccatagatgcaatcaaactaaccctgatcccttaagaaccctgaagatggtgataccagtacaagagaggatactagaggcctcggggtggtgaggaacaacatggaaggtagcaaacgactggtgatgtaggtagattagggttagctttaagagcatttgagagagaagagggatttccgggcggcggacggtggcaaaatgaaaggattttggggggtcgtttggtttattttaggtaagggtcaatctggaccattgatcacaatgatcaacgaccaggatttgcccgggttattgggttggggcagatgggtattaggctgcgtatattttggatttaaaattgggcttgggtagtgggttgaattaggaccaaaattgaaataaaaataggacagattttaaatagccacttttaataactaaataaattataaaaataataagtgagttccaaaaatatttttttgtatactaaaatgattaaaaatagttatttaatattttaaaaatataaaagactattttatgcataaataatgtaattatacattagtaagggatattattgcaaagatgtgcaatttagcttaaaaatgtaaatataattacgaaaaatgcacaaaaaataattaaacactatgttggaataaataataaatttaaatggataaatcaccacaaaagtaatttgaaggataattattggattatataaataaaagagaagaaataaattgatttggagcttttaaaattatagaaaaattataaaaatacttatgcatgcttataactgcatatgtactattttgaaagtatatatatatatatatatatatatatatatatataatatgtgaaacaaaattgggtatcaacaataagactcctcatagcctttgttgcttacatggaatttactcttaccagatggacataaagagtgccttcctcaatggctatttaaaagaagaagtgtttgtcaagcaatctccagggtttgaaagcaagtagtgtccgaattatgtgtacaaacttgataaagcactctatgggctcaagcaggctcctagagcatggtatgaaagattatcaaaattcctgcttgagcatgactacaagagaggtaaaattgataacactttattcttgaaggaaaaaagtaaagaccttctagtagtacaaatatatgttgatgatattatctttggagcaactactgataaattaagtaaggaatttgctaaatcgaaatgagtatgatgggtgagcttaatttctttttaggcttataaattaaacaaaattcagatagaactacgatccatcagtagaaatatgtgaaagagttgcataaaaggtttaaaatggaagaataaaaagaaatcgatacttctatagcaacaaccataaaattggatatagatgaaccaggttcatctattgaatagaagttgtattgggaaatgattggttctctttttgtatcttactgctagcaaacatggcattgtttgcagtgtaggtctttgtgctcgatttcaggtaaattcaatggagtcccacttgcctaatgtcaagagaatattgagacacttgaaaggcaccactaacctttgcctttagtatccaaaaggtaataattttaacctagtgggatatgctgatgctaattatgcaggttttcttgtggataggaagagcacctcaggtatgacacactttcttgatttatgtcttgtgtcatgggatattaaaaagcaaagttcagtagccttatctactgctgaagctgagtatgttgctgctgcttcatgttgtgctcaattgttgtggatcaaacaacaattaatggactttggaatctatgttagttgtatccccattttttgtaataacactagtgcaataagtatgacaaagaagtcaattcatcataagaggactaagcacatagatgttagtcatccttttttgagggataactatgagaaaggcttgattactatacaattttgtgctactaacaagcaaattgctgacatcttcacaaatgccttaagtagagatgattaaaatcacctaaagggccagttcaaggttaaacaaaaaaaaacaaaaaaaaacaacaaaattttggttagaaagtctgtacattgtacataagtagattaaatcttgatcagtctcatacattcaatagtatatcttgttccatgtgttaaaataactcattaatctctaatgttattttctttattttacaaatttagatttacacaagaaaattattagagaagaacctggtttatcaagataacacggtatgctttctacactctgcatattttgaaataataatatttgaatcatgagcaaagtcctacctaagctaaatttcctttgaacttatccaataagtgaaccagttcagtgcatagattcccacccaaattaagtcacctagattctaaggaatactccatcgtctagtcaaaaactgaaatttcagtttcattagacttctaagagtctgaaaaagcctattgttacccattaattactctctttaaattgatcatcatcatccctgccttcactccctaattttcaaaccgtcaaaaccttctccatcttctctcattctccaaaattcaatctatctttcttcattcttccaaatccaagatactaacccctctgataatcatggtactcccccaccaaactcttcatcttcaaccactccttagcctaagaaatggagagttaagatgcttgctcacaagaacattgctgggaaggaattatcaaagaaattgaatgcacaattaaaatctagccaagcccaggaaccctagaaatttgacaactccttcaagtcagctactgagggggaagaaacggggtcttctaatactgaacaggtaacttctggaataaatactatgaatgaggttatttctgtgttagttgaaaatttggagaataggtttgttttagttggatctgttgtggatgtagaaactccaaagtctagaaagagaggtgctaaaaatagaaaggaaaaagactaggagagtgagggtattcgaagtgaagaaatgggaatggtaacaaaagtggttgactcttcacccacttctgatgaaggaagaatgactaattgtggagcagaatcagataatttagaggaaaacgtcaagaaaatagggggaggtgggtctagcgaagccgttgaagggctggctaaaattgggtaaaatatagataaacctggttcaacagttgatgaaaccctcacagacctattaaagaaggtgagtgatagctacaacccaaagaattagagaacttcactggctaagacccgtggcactgctagggctaacaagaaaaggaaggttgtccccctctgacactgttgaagttcctccaatggcaagagccacaagaagtcaattaaagcagaatgaggaagatctacagagagccttagaataaagcaaaaagaaaaggatggataaagggtagaagaagataggaaagtctgttgagactattgatgtggatgagatggatctggtccatcaagatgaagatgtgactgctgaactggaggttcagactcctaagcccaagaaatccaagactttctccaagaagtctacttctatgtcaaagtctgctgaactatccaccctggcaaaaaggaccaggtccacagtgaaaaccatacaagcaaaagttactgaaggagaggcgtggagtagtgaagaggaagatgaatcagacagtgaaaaggacaagatggctaagtttggcaaaagaactattctgaagggtagattcctcaaggatttggaggaggaagggatagtattgctgttggaaaaattagaagtacaaggctggaaggacatggtcctttagatggatggcaagttggctagggatgaaatagttgaatttatggcaaatgctgcagtgctagatggaagggatactagcttagtgaaaggggtgcaaatctcttttgatatgaaggagttgggtggaattctaggtgtacatgatgaagggtacaataattacaaaaagcttaagtggcaaagcctagaaaattttcctactgcccttgccatcaccagaaaattcagtgatcatgagaaggaaagtgtgcccaagactgtgtacaagagtgaaatgaagtcaccccacaaggttttgtttgaatttgtcatcaaatatgttctgcctaggtatgagaggaggcacactgcaaacttcatggacttggttctaatggagtgtctagattgtgggaagtagataaattggcctggatttataatccagtttcttgatagggttatcaatggtaccaagtctcattctattccctatggtttcattcttacaactgtgctttcttgttttaaggtgcctttgaataagtgtgaggtggctacaagcaaagatcactttggggcgaaaactttgattgcttgtgactatgaggtccatgccactcctaatgaacctggttcacatccaagaagataccagtaaatagctcttggtataggaaagtgaggcaaaggaagctaagatagcaaggatgaagacacggttggctgaggtagaatctgagagagatgctctcagaacaaaacttgcaagacaaaaggagaagaatgatggaatttttcaagacatgctgaaacttctccaagaaaataacccagcacctcgttcttccaagcctaaagttcctagcctagtgtagttccttcagtgacccagcttgggatgtttcttttgttgatgtttgctcatgttttcaatatttttatttccttttatgtattgtggaagaatcatatcaactatcaatgaaatcaatgaaatctactggtttttgttctaactgtttgtttttatttctttgatggttgaaattcttagcttaatcaatgatgattaatccatgattgcatttgggatagcccgagtgtacatgagtaagttttacaatccgggtattgcacatttttatgcactttttctatgatgccaaaagggggaaaataagttgtgctttaaacaagcgatatttagctttgaacatgtgatatttataaccttatgaacctggtccttgatgataagtgataacaaggaaaaatatttctaacattttgttgatattaagctgagtttaaacagggcctaagcttatgaaaagcacatagtttgtcatcatcaaaaaggaaaaatttattggcccaagtgaaggtttgttttgaagactgacaaaggaactcaggcatgagccaggtctatcctttgtgaacacgggcagagttgtgcatgtgggatgcacgtgatggagataaacttaacttggcacaattgatatctcctgatcggaaaggttgtataattgattaggagaaggacttcttactcaaagagaacattatccaagatagggaaggagtcagaagttgggatcaactagaacttttccactaaggaagagtagtattagaactctagttatttgttcatatactaactctatatattgtaggatgttctcatttacaggtaatgtacaaatgcagaagttaaacaagaattgagagcaaaatagcaaggcattttgcaagcagtttgtgtgtgattcaagtgtgcaaatatgaatctacatgaaccagatagaagaaccagttccaagtgtctctcttttattctagttcaattatagtaggtgttttcatattgtacctttcagctttatgtagaggcaattgtaatatatactcaaaatattcaatttagagttaacttgaagttgccacaataattagaggttgtgtgctacaacgtgattagagttagtcctaggtttacaaatatttttttgtaaatgcagtttttggttcagtgattttagtggagagtttggaaaaatcctactggaaagtaggtcgtggttttttcaccctttgagccaaatattttcacgtaaaatacttgtgttttttacttttcgcatttactatttctgcaatagtaggttaaggatcacttagaagaatcacgttcttccataatcagtttaagtaaaaaattggacaccacacaaattatcctttgtgtggtattgaagttgaaacatcaatgttatgcgtatgatcttcccacaaagtttaacaaggatctgttcaaaaaattaccctgatttagacccgtggagttctatctccttgttttgtatgacttttcttgtgggaaggtggatggtgttgcgtgtggcagtgttggtggggagagataaggagaaagtagatggtggtgaaaggtgttccatgtctgcaatgtgtgcatatctaatagtaatatacgttaacttaggttcaggtgttcaataggaataaagtttagtttaggtatctaaattaaaaaggcggacaagttccaggggagcatatgtatttgaccttggataaagatgcagattctattttatacaattatgacatgtatcaatcgcctattttgtacattgcacttcctttctgtagtagtaagtgtattcctagcagtttctcttttacgtatttagttttctcattgtcttaagaggtctttggggaattcagttttcctgcgaggatactctatggagtatatgtaatgtttatgatcactgcgactgtttcttaacttaatactagtaaggcaagcccgtgctacgcacgggtccaacactattaacataacttttctgatacaaaagatattttctgtattaagttcaattaacacataaaaacttgagagtttgaaaattggatacaacttctaatgcaattttatttttcgtcatctgaagccaccttcccgttgcaatctcaataaagggaaacctttgaagaaaaaatgagttgaaatctctttatttcatgacggagtaatataaaattataaattataaggttggaaaatcattctaaataacaaaagtgatgaaattcacttgcttgaaaaatgcggaagacaaaataaaagaataacagggttctggttcaaaacattgcgtatacttaaaaaggaaataatacattcaataaatatcactttctcaactttcctaaaacatttggacataaaaaagatacatttactatctcatattaaattcttctaggcacttgatgcgattatataccgcccttttgttggtttcctttacactacaatcacgtaagaacagatcaatataacgcatcaactcttgatgccttaacattatcctctgaactcttatggcagatcaaaggaaactattccaaaaatattttattgaccattatcttcgtattttggagctttgtaaatttgctttatagatgacacaatgttattcctcttaacattattccaaagtttggcgaacttgatattttcacttattaagtccttatatgaagagctagcttacaaagatcaaatgatttgtcttcaacctgcagtaaagagcaacaacttaatgagagaacacaagtgaactcataaagagccattttacaactttcaacaatgtggccgtttagaaatcaaatattccatgtccaaaaaaaccttaaagtacaagaactatttgattatctaataattttggattttatatttcatccaagagtttctaaataaagatataaaatgtcagaatgaaaattcgatgaccaacaacttatgacagaatatgtgtattcattgtgtgtgatgatccaaagggtcataaccggttttctacctttttctgggctttcgaggtcttgaaaacctcatctttagttgcctcgatttgcgtgcatagtccaggcgcgtagccggaaaagcttatgtgttaaattatgtgaaatttgataaattgtggctttaaaatggttaaagttgattttggtcaacattttgggtgaacgaacccggacccatgatttgatggtcccgaaggatctgtagaaaaatatgggactcgggcgtatgcctggaatcgaaattcgaggtcccgagcccgagaaatgaatttttaaaagaaattgttttttgaaatttaatatgaaaatttgaaataaaaatgaattagaaagcattggtatcaggcccgtattttggttcaggcactcgatacaggtattatatgtggtttaagcgctttctatgaaatttggttgaaatcggacgtcatttgacgtgtttcggacctaaaactctaaatttgaaagtttatgaagtttgatagaaaaaaatgatgattttgaggcttgattcattgattttgatgttattttggcgatttgatcgcttgagtaagttcataggatgttattgagttagtgtgtgtgtttggttaggagccccgagggctcgggagtgattcagaggcggttcggggtgtttttgaccttaggaagtgttgcagaatttctgcagtcagtgcccagtcattttcttctatgcgatcacataggtatgtctgcaatcgcgtagagttattttggagtcgcccagttttgttctatgcgatcgcgttataggccatgcaatcgcgtacctctgtaaactcattctatgcgatcacacactcccttctgcgttcgcaattcacaaaaggcctagccccgctttgaccctctatgcgatcgcactcgtcatcccgtgattgcagtgaccagcctaccttcccctatgcgatcgcattccctttcccgcgatcgcatagggcaattccgcccagttattttaaaagtccaaaacagacccattacgggagttctaccatttttcataaaacttgtcttctccaagctctaggggcgatttttgaagctcttcttcattaaagtcttttgggtaagtaatttcccacctatttccttcactcttcttcattaattactgaaattctaaacctaaatcatgaaatcaaagtagaaattaggagttttgggtagagttatgtttttggaaattttgagtgattcaacctgaatttggggtcggatcttaaaataaattatatatttgaactcgtggggttatgggtaatcaggttttggtccgaccctcgtgtttggaccatgtgggcccggggtctaattttggtatttttggaagaatgctaggaacttcatatctaagctatgtgattttgttatcgagtctttattgatattattgaattaattatgcctagatatcgttgtttcggagtcgggttataaaggaaaggcaatatttgagggttgattgctattctttggaccgaggtaagtgtttgttctaactttggcttgagggaatatgattaaagtattgtttgctatttgctaattgttgagtacggtgtataggcatggtgacgagtatctatacaccggagtctagcatgaccgtgcctcttatttgttttttttcggatttaatgatacctcttccttgttaaattcataaatttcatataatgtgaagagtttgaggaagagttatgatttgtacattcttggagcgttggctcgagtgtatcataaatcatgaaagtatatgaaatgattaaacccctttggagcgttggctcaggtggtaaagtgagataagaggtaaaagtgaaagaaagagaaagaattattgaattgctcccttgccgggatgcttgttgctttgttgactatctcccttgccgggatgcttgttgttttgttgactatctcccttgccgggatgcttgttgctttgttgactatctcccttgccggaatgctgagattattgttattgttcccttgctgggttttttttaactgcttaattgtgctcccttgccgggagttagctgtttatttgtattcccttgccgggatttctatcattatttgtctactcccttgccccttatttgtgattgtttcttgggtgaggaagagtgataaagcacgaagggtgatgtcgtgcattgtttgctattgtgaggaaagagtgtaaagcatgaagggtgatgtcgtgccgcatgatgtactattctgtgccgattttattgattatatggtgagtaaagagagtaaaagcacgaagggtgatgccgtgcatatttcatttatatgattgctttggtgaggacgagagcgtaaagcacgaagggtgatgccgtgtatttgttgctttctgattctttgttgatattcgagttatgttgtttctttcattacttgttcttatttgatttacttcgaggttatagatttccttaccctatttgccttgtgattgttgtttgggtgaggaagcgcgtaaagcacgaaaggtgattccatgtattgttttggtgaggacgagagtaaaagcacgaagggtgatgctgtgcaaattgttgactttttattcttcttgacattctggctttgttacttctttctgttattgaggatttctatttgaaacttttagctccccatagcatgctccccccttcttagctgtttaaattctgtatatttccttttattgcatatatctgcataggttgtttttggtaggtcctgtctagcctcgtcactacttcgcctgggttaggccaggcacttaccagcacatggggtcggttgtgctgatgctacactctgtgcatctttttgcacagatctaggagcagcttttggaccttaacaataggatttgatcgggagctgacttcagtccagagacaccaaggcagccttgctgacgtttgcaggcccgaagtcactctctctttattcagtttgttatcttttgtaccgaaacaaacaatttataattttctttcagacgattgtatttagtaaatcttagaagttcgtgagcattgtgacaccaatcttgggtagaggattatgttaaactttccgcatttctattcagtttttatataagttaagacttccgcttgaaattttaattatgttgcctctattacatgttgataattatggaaaagaatatgtgttaaacggaaggtaatttaagttggcttgcctagctcctattagtaggcgccatcacgaccccgagggtgggaaatttgggtcgtgacaagttggtatcagagcactaggttacttaggtctcacaactcacggacaagctcagtagagtttgagggattggtacggatacgtctatatttatccctcagaggctactgagttaggaaaacttcacatctgttctttcttgtcgtgcggttctgtttccccaatactgattgaatttctactccgttctttcgcaaatggcgaggacacgcgcttccttatcgaccgagcagcagcccgagcccccagcagcagctcctattaggggcagagggcgaggccatgctagaggccgaggtaggggcagagctcagccccgagcagcagttccagaggtggagcctcatgttgattatgatgaggaggttccagctccagtaactttggtgggcctaactcaggtcccagagggttttattgccaccctagttcttcaggacgccctggttcaattggtgggccttatggagagagtcacccgaatatgttttcttcctgtagcaccagccacttctctggctggaggaggggctcagactccttctacacgcactccggagtaggtagctccccagattcagattccagcggtttagctagttagggtagttcagccgggtgccatagctcagaccggcgatggagcggctatgttcgtcgatgctttgtggagactggataggttcaccaagctcttcacttctacttttgccggtgcatttactgaggatccccaggattatctagaaagcttccacgaggttctgagaaacatgggtattattgagaccaatggggttgattttgctacatttcgcttgtctggatccgccaagacttggtggagggattattgcttagcgagaccagccggatctccatctttgacttgggagcagtttacagtgttgtttctagagaagtttctccccgttacttagagagaggcctatcggaggcactttgagcgcctccagtagggttctatgactgttacccagtatgagaccaggttcaacgatttagctcgccatgctctcatcatacttcccaccgagagagagagggtgagaaggtttattgatggtcttattctgccaattcgtcttcagatggccaaggagggcgggagcgagatcacatttcaggaggcggtcaatgtggcccgcatagttgagatggttatgtcatatggaggtggtcataggtcggataagaggccccgtcattcaggaagattctgtggtattgcgtctggaggtagagattcgtatggtagaggccatcctcctaggctcgttcagtcagctcaccaggtatcacatggtatctcaggtggtcgtggttctcagatgcattatttggatcagtagtctttcagtgcaccaccatctcccatcagtgcaccgccacttcagaatttctgaggtggtcattcagggcaatagggtcagcagtctcagcagccgagggcttgttacacttgtggtgatatgggtcacatttctaagttttacccttgagcttcgggtagttctcaacaacagggtcctcgccttatgattcaggcaccagttgctccatagcctgcccagccagctagaggcgggggtagaggacatagaggtggaggtagaggtcatagaggtggagctcagaccgccagaggtaggggtcagccaacagccgatcgtcccagggttgtgatttagggaggtagggcccaaccccgatgttatgctttgctagccaggccagaggctaagtcatccgatgctgttattacaggtactattttggtctgtgatagagatgcttcagtgctatttgaccctggatctacgtattcacatgtgtcgtcctattttgcaccctacttggttatacgtagtgaggccttgagtattcctgtgtatgtatctacactagtaggtgattctatagtggttgattgggttcatcgttcctgtgttgtggtgtttaggggacttgagacccgtgttgatttgttgctcttagatatggtggattttgacattatattagggatggattggttgtccccgtatcatgcgatcttggattgtcatgccaagattgtgactttagccttatcggattttccccatttagagtggagagggactcctggtcattctacccgtagtgttatttcgtatgtgaaggctcggtgtatggtcgagaaggggtgtttggcctactcagcttatgttcgtgattccagtgctgagattccctctattgattctgtgaccttggttcgtgaatttcctgtggttttcccatcagacttgccaaggatgccacccgatagggatattgatttttgcatcgatttggctccgggcactcagcccatttctattccaccatatcacatgtccctgctagagttgaaagagttgaaagagcagttgcaagacttgcttgagaagggtttcattagacccagcatatcgccttggggtgcgccgactttgtttgtaaagaaaaaggatggctcgatgagaatgtgcattgattaccggcaattgaacaaggttacaattaagaataagtatccactaccgaggattgataatttgttcgatcagcttcagggtgccaaggtattttcaaagattgacttgagatgtggctaccatcagttgaggactagggcatccgatgtccctaagacagcattccgcactcggtacgggcattataagttcttggttatgtcatttgggttgaccaatgcccctgcagcctttatggatttgatgaaccgagtgttcaggacttatttggactcgttcgtgatagtcttcattgatgatattttgatatattcccgcagtcgggaggagcacgagcaacatcttagattggttcttcagaccttgaggtatagtcagttatatgctaagttctcgaagtgtgagttctggttgagctcggttgcatttctgggtcacgttgtatcagcagagggtattcaggtgggcccgaagaagatagaggtagtcaagaattagcctcgaccagctttaactacagagattcagagtttcttggggttagaaggttactaccgtcggtttgtggaggggttttcatccattgcagccccgatgaccaggttgacccagaagggagcccagttcagatggccggacgagtgtgaggcgaactttcagaagctcaagaccgctctgactacgacaccggtattggttttgcccgcaggctcagggccttatacagtctattatgatgcatctcgtattggacttgatgcagtgttgatgtaggatggcaaggtcattgcctatgcttcgaggcagttgaaggttcatgagaagaactatcctgtgcatgatttggagttggcagccattgttcacgcattgaagatttggaggcactatctgtatggcgtggcgtgtgaggtgttcacggatcataagagtctttagtatttgttcaagcaaaaggagttgaatttgaggcagaggaggtggttgaagttgttgaaagattatgacatcactatcctatatcacccgggaaagtccaatgtggtggccgataccttgagtaggaagtcagccagtatggtcagtcttgcttatattccggtcggcgagagacctcttgctttggacgttcaggatttggccaatcagttaatgaggttggatatttctgagcctagtagagtattagctagcacggtcgcccgttcttcgttattagagcgtatccatgatcgacagtttgatgatccccatttgtgtgtccttagggacacggtacagcgtggaggtgccaagaaggttaccttagatgctgatggatttttgagattgcagggtcaagtttgtgtgcctaatgtggatgggcttcgagagttgattttagaggaggcccatagctcccgatactctaatcatccgggcgccgcgaagatgtatcaggacttgcgacagcattattggtggcgtagaatgaagaaggatatcgttgcctatgtggctcggtgtttgaattgtcaacaggttaagtatgagcatcagaggcctggtggtttatttcagaggattgagcttcccgagtggaagtggaagcggatcactatggacttcgttgttgggctcccgcaggctcggaggaagtttgacgcagtttgggtcattgttggtaggctgaccaagtcagcgcatttcattcctgtggcagtctcctattcatccgagaggttagctgatatttatatctgggagattttttgccttcatggtatgccagtatctatcatttcggaccgaggtacgcagtttatctcgcgtttatggaaagcagtccagcgagagttaggcacctaggttgagttgagtacaacatttcgtcctcagacggacgggcagtccgagcggactattcagatattggaggatatgctccgagcttgtgtcattgactttggaggttcgtgggatcagttcttacctttagcagagtttgcctacaacaacagctaccagtcgagtatccagatggctccttatgaggctttgtattgtaggcgatgtcgatctccggttggatggtttgagccgggagaggctcagttgttgggtacagatttggttcaggaggctttggacaaggtcaggatcattcaggatagacttcgtacaactcagtccaggaaaaagagctacgcagatcgaaaggttcgagatgtggctttcatggttggtgagcgggtattgctccgagtgtcgcctatgaagggcgtgatgagatttgggaagaagggcaagcttagacctaggttcattggtccatttgagattcttgatcgagtgggagaggtggcttatagacttgcattgccaccgagcttatcagccgtacatccagtgtttcatgtgtccatggttcagaaatatcacggcgatccatcccacgtgttagatttcagcactgtccagttggataaggacttatcttatgaggaggagtcggtagctattctagaccggcaggttcgccagttgaggtcgaagagtattcctttggttcatgttcagtggagaggtcagcctcttgaggcatcgacctgggagtccgagtccgatatgcaggaccgttatcctcaccttttccccgactcaggtacttccttcttatgtccgttcgaggacgaacggttgttttagaggtggagaatgtgacgacccaaagggtcatcaccagttttccccctttttctgtgcttctgaggtcttgaaaacctcacctttaattgcctcaatttgcgtgcatagtccaggtgcgtagccggaaaagcttatatgttaaattatgtgaaatttgataaattgtggctttaaaatgattaaagttgactttggtcaacattttaggtaaacgggctcggacccgtgatttgacggtcccggagggtccgtagaaaaatatgggactcgggcgtatgcccggaatcgatatccgaggtcccgagcccgagaaatgaatttttaaaagaaattgttttatgaaatttaatatgaaaatttgaaataaaaatgaattagaaagcattggtatcaggcccgtattttggttccggcgcccggtacaggtcttatatgtggtttaaggactttctgtgaaatttggttgaaatcggacgtcatttgacgtgtttcagacctaaaactctaagtttgaaagtttatgaagtttgataaaaaaatgatgattttgaggcttgattcattgattttgatgttattttcacgatttgatcgctcgagtaagttcgtaggatgttattgagttagtgtgtgtgtttggttaggagccccgagggctcgggagtgatttagaggaggttcggggtgtttttggccttaggaagtgttgcagaatttctgtagtcagtgcccagtcattttcttctatgcgatcacataggtatgtctgcgatcacgtagagttattttggagtcgcccagttttgttctatgcgatcgcgttataggacatgcgatcgcgtacctctgcaaactcattttatgcgatcacacactcccttctgcgatcgcaattcacaaaaggcccagccccgctttgaccctctatgcgatcgcaatcgtcatcccgcgatcgcagtgactagcctaccttcctctatgcgatcgcattccctttcccgtgatcgcatagggcaattctgcccagttattttaaaagtccaaaacatacccattacgggagttctaccatttttcataaaacttgtcttctccaagctctaggggtgatttttgaagctcttcttcgtcaaagtcttttgggtaagtaatttcccacctatttccttcactcttcttcattaattactgaaattctaaacctaaatcatgaaatcaaagtagaaattaggagttttgggtagagttaggcttttgggaattttgagtgattcaacctcaatttaaggtcggatcttaaaataaattatatatttgaactcgtggggttatggttaatcgggttttggtccgagcctcgtgtttggaccatgtgggcccggggtcgaattttggtatttttggaagaatgctaggaacttcatatctaagctatgggattttgttatcgagtctttattgatattattgaattaattatgcctagatatcgttgtttcggagttgaattataaaggaaaggcggtatttgagggttgattgctattctttggaccgatgtaagtgtttgttctaactttgacttgagggaataggattaaagtgttgtttgctatttgctaattgttgagtacggtgtataggcatggtgacgagtatctatacaccgaagtctagcatgaccgtgagtcttatttgtgtttattcggatttagtgatacctcttccttgttaaattcataactttcatataatgtgaagagtttgaggaagaattatgatttgtacatttttggagcgttggctcgagtatatcataaagtgtgaaagtataatgattgaacccctttggagcattggctcaggtggtaaagtgagataagaggtaaaaatagaaagaaagagaaagaattattgaattgctcccttgccgggatgcttgttgctttgttgactatctcccttcccaggatgcttgttgctttgttgactatataccttgccagaatgcttgttgctttgttgactatctcccttgccggaatgctgatattattgatattgttcccttgtcgggtttttttaactgcttaattgtgctcccttgccgggagttagctgtttatttgtattcccttgccgggatttctatcattatttatctactcccttgccccttgtttgtgattgttgcttgggtgaggaagagtgataaagcatgaagggtgatgtcatgcattgtttgctattgtgaggaaagactgtaaaacacgaagggtgatgtcatgccgcacgatgtaccactcggtgccgattttattgattatatggttaggaaagagagtaaaagcacgaaggatgatgctgtgtatatttcatttatatgattgctttggtgaggacgagagcgtaaagcacgaagggtgatgcagcgtatttgttgctttttgattctttgttgatattcgagttatgttgtttctttcattacttgttcttatttggtttacttcgaggttatagatttatttaacctatttgccttgtgattgttgtttgggtgaggaagagcgtaaagcacgaagggtgatgccgtgtattattttggtgaggacgagagtaaaagcacgaagggtgatgccgtgcaaattgttgacttttgattcttgttgacattctggctttgttacttctttcagttattaaggatttccatttgaaactggtagctccccatagcatgctcccctctcttagttgtttaaattctgtatatttccttttattgcatatatctgcacaggttgtttttggtaggtcctgtctagcctcatcactacttcgtcgaggttaggccagacacttaccaacacatggggtcggttgtgctgatgttacatctgtgcatctttttgcacagttccaggagcagcttttggacctcagcagtaggatttgatcgggagctgacttgagtccacagacaccgaggtagccttactgatgtccgcaggcccggagtctctctctctctctattcagtttgttatattttgtaccgaaataaacagtttataatttactttcagatgattgtatttagtaaatcttagaagttcgtgagcattgtgacaccaatcttggatagaggattatgttaaactttccacatttctattaagtttttatataagttaagacttccgcttgaaattttaattatgttgcctctattacatgttgataattatggaaaggaatgtgtgttaaacggaaggtaatttaagttggcttgcctagctcctattagtaggtgccatcacgaccccgatggtgggaaattcgggtcgtaactttgtgattttactttctcaagcaattcaatatcttctagagcttgatgtgacctattgatgtttttggtggtgacataacttcttttatcatgtttgaagaaaaattattaaatgagataaagtggttgtaagatggttaattagagtaaaataacaatggacgaggaacataatctcgttacctatactcaatcataaaaataagaaagaattttacctcttcccttttttttgtaccagcaagtgaagctccaaggcaagctttgtatagacaaaaagagaagaaaacttgttatgctttaggaaccactttcttcttactgttaccaagtagttatgctctaggaactctttctttttactgtaccatgtaagaatatttatagaagataaatggccatccagttccctctgcaagcaaaaaaacttgaaagtacctaacttatttaactaaattctggagccaaagcgaagcctaacttactgactaaaatcattgggaatacagtttggtgttgaatttattaaacatctcctaatgctgaacttgatcatccatctcctgtaacatgcatattcacagaaagaggcttctatgaatgctacaataatatctatgaatactacaataatatatgaaaattataatgatcgaacagtcggattaagcatctacttaactgatataagaaaaataaagtatattaattagaagaaattcaaggcaatattcagttactcatcgtgaaagacctttgctatgaggctttatttagcttggactttatgccaattactatttctttttatcctttttctctttttttatatttaagtagatttagaatatatacttttcaacaccaaatctcattagattctgacattagcttctaatcctctatcatacttttcttaatcaagagaatttcaacaccaacttctttagattctgatgaaaattactaaccctttatcccacttttcttaatgagatttagaatatttttcgacaacataactcgtaagatttcaatagaaagatcaaattatttcttctacaaaaaattgtgaaacttctaaatctgagcaggtaaggaggacagggcactgctaaaacttttctcaaaccagggtcggctccatagtgatgagaggtaaaggcatgtgccttaggcccccaaatttgggggtcccattttaaaaaaataataagttcataagtattttaaaaataatatttaatatttttaatacaaaaatagagtatttaatataaaagaaaagaaaactttttagatatataaatgaggtaataatttgacttacttaaaaataggtagatgaatactttttccaattttttactttttcactttttacttctttaaaaatttgctctctcttccttaatttgtccaagtcactctttcttttttctaatctcttcatatctcggaaaatcctatatattttctgtctttctatgtgatattcttactcactttctttcttcaagatttcattactcacctttttctcaaagatgtcattagttcaagtgttcaacaatacttttaagttttcaatagttctatacttctattgctctgtaaaatctcatctaatatcagcaatatctcaagaaagattaaataagctagttatgttatcaattgaacatgaactattagagaaaatcgattataaaagaattattaacaattttgtatctcaaaaagttagaagaataaacttcaaataaaaagatatcttataacttttttttaaaaaaaaattaggcctcatattaaactatggctttaggccccgtatgtgcttgagctgcccctgcctcaaacatcaaaacaccaatccattaaaagtctataaaagatattaaaagaagcaacattggactacatgaaaatcttaaaattgttctactatatcaaagcacaattaacctcaaactctcaaagaatctgaagatatctctgatttattttgataaaaattgtctataatgagacacatccacaataaaaacacaaatctagcaaaaaattacaactaattacatttgttcttattaacaataatgcacaaaaatgtagacaacatataagtcaaaagcatgagtatgatgaattaattttggtagtaacaattatatttaacccataaaatttatcttacgctggatgaaaaaatacaacaaaatatgcgaattgagttcaccttggcgtgtgaaactaacaaaacctaaggtgaattagtggagaatacatcatgtagttctgcaactgattttgtaggagaaccaaaaacaaattaacaaaaaggatgtactccaagttgcttcaataattgtgacgacccggatttctcaccctcgggagtcgtgatggcgcctactaatgtgagctaggcaagccgactgtttgaactaattacctttttaccccttttatattctttaacaattttaaagcaataaagtgtagacaacggaatttacaataagcggaagaaaagcaatgaactatctaaatatgtatccaatacaaccgcttgaacctcgactacccagaactggtgtcacagtttcacagacggtctaagaatactatatacaaagtctgaaagataaaagatacactgattctgaaataagtaaaggaaacaggataaagaaaagataggaggtgatgccaaggcccgcggacgtttgcaggactacctcgggtcacctgtgtgaactgaagacagcaccctcactacggtccaagcgctccggaatcagtatctgcacacagtgtagagtgtagtataagcacaaccgaccccatgtgctggtaagtgcctagcctaacctcggcgaagtagtgacgaggctaggaccagactaccaaataaacctatgcagttaaatcatatacaacagaaatataaaagcagataattacatttaaagatgggagggggaaacatgtttcggggaataacagacaacaacagaatatcaagaggaatataaataaaccaaaatccaattactaacaaggataaggaaaacaaatgcagaattcactttcatttcacatcttgttgtaggcgtgcaacccgatcccatttcatatatctcgttgcaggcatgcaacccgatcccatttcatatatctcattacaggtgtacaacccgctcccatttcatatatcttgttgcaagcatgcaaccccttcctatttcatatatttccgtggtggcgtgccacccgatcccatttacaaatcaataataatcacaaaagaatcctggcaagggaacaagagcaatatagcatcatcccaacaagggaacaataatattttaacaacatcctggtaaggaaacaataatatcaaaacaaacatcccggcaagggaacaataataataataacatccgggaaagggaacaatattggtaatcctcatatgaaatacaataaaccacaacgtgtcataacaattacaatacaagactcacgggcatgcttgacaccaacgtatagatactcgtcaccatgcctatatgtcgtactccacagttacctcatagaaaataagacacgactcctaatccttcaagctaaggttagacaaaacacttaactcgatgccacgaacacaattcaagtctcaattattgctttacctcttgatcccaccaccaattcgctcgtatctagccacaagttacttaattacgtcaataaatgctaaatgaattaattctaatgtatgaaaataagttttccaaaggtttacccaaaaagtcaaaaatcgctctcggacccacatggtcaaaattcgaggttcgaaccaaaacccggctacccattcccctaagaacccaaatatataatttgttttaaaatcggacctaaaattgaggttcaaatccccaatttttaaaaaatctaggttctaccaaaaacacctaattttccccatgaaaattattgattttgagttgaaatcatgtgaaaagatgttaacgattgaagaaaacgacttaaaattgacttacaatcgatttggaagaagagttgtctttgaaaattgcccaagggtgttttggttttgaaagactgtgaaaaatgaaagattttcggctaagttataaaattggaggttgcagatgttgcaattgcgacaagtgttcgcaattgcgaacccagacttctgctaagctcacatttgcgaagtggccctcgcatttgtgaggttggaattgtgaacatacaatcgcatttgcgataacaggcccaaatggggagtatcgcatttgcgaaggaaaaatctcgcatttgcgaagaagggctagcctgagatgtttcgcatttgcgactcagcctttgcatttgcgaaggaaaaatctcgcatttgcgaagaagggctatcctgggatgtttcgcatttgcgatgcgaagcctgcaggcctgcaatgaaacagctgaagcctgcaatttctcaagtccaaaatccaccccgtggcgtatccaaaactcacccgacccctcgggactccaaaccaaacatgtacaccaacctaaaaacatcatacggacttgcttgtgcattcaaatcaccaaaagaacgtcaacaactacgaatttagcatcaaaatcataaaatttcttaagaacatcaaatttcccaatttcctcaaataaggtccgattcatatcatatcaagtccgtttcttaccaaatttcacaggttcgactcaaatcatatataagacctataccggggtccggaacctaaatacgggcccgatactatcaaactttaaacacatttcactttcaaaaactcataaatattccagaaaataattttcttcaaaaattcaatgctcgggcttgggacctcagaattcgattttgggcattcgcccacgtcccatattttcctacggaccctccaggaccgtttacccaaaatgttgacagaagtcaacttaaatccattttaaagtcaaaattcatcatttttcacagattttcacataatggctttccgactacgcgatcggactgcgcacacaaatcgaggcaagacaaaaagaggtttttaaggccgcagaacacataattcatttttaaaacaagtgatgacccaaaaggtctacattctccacctctaaaacaaccgttcaccctcgaacggacataagaaggaagtacctgagtcagagaaaagatggggataacgccttcgcatatcggactcggactcccaggtcgatgcctcagcaggttgacctctccactgaacacaaatagagggaaaactcttcgatctcaactgacaaacctgccggtctaggatagctaccggctcttcctcataagacaagtccttgtccaactcacagtgccgaaatctaacacgtgagatgtatcaccgtgatacttccgaagcatggacacatgaaacactggatgcacggctgataagctcggtggcaacgcaagactataatccacctctcccactcgatcaagaatctcaaacgggccaatgaacctagggctaagcttgcccttcttcccaaatctcatcacgctcttcataggcgacactcgaagcaatacccgctcactgaccatgaatgccaaatctcgaaccttacgatcggtataacttttttgcctggactgagctgtatgaagcctatcctgaatgattctgaccttgtccaaagcatcctgtactagatacttacccaataaccgagcttcccctggctcgaaccatctaaccggcgaccgacaccgcctaccatacaaagcctcataaggagccatctggatactctactagtagttgttgttgtaggcaaactctgctaaaggcaaaaactgatcccacgagcctccaaagtcaattacacaagcttggagcatatcctccaaaatctgaatagtccgctcggactgcccgtctgtatgaggatgaaacattgtgctcaactcaacccgtatgctcatctctcgctgaaatgctctccagaaataggaggtaaattgcgtacctcagtatgaaatgatagacatgggcacaccatgaagacgaactatctcccagatatagatctcagctaacctgtcggaagaaaaggagactgccacaggaatgaaatgtgctgacttggtcagcctatcaacaataacccatactgcgtcgaacttcctccgagtttgtcggagtccaacaatgaaatccatagtgatccgctcccatttccactcgggaatctcaatcttctagaacaaaccaccaggtctctaatgctcgtacttaacctgctgacaattcaaacaccgagccacatatgcaacgatgtccttcttcattctcctccaccaataatgttgttgtaaatcctgaaacatcttagcggcacctggatgaattgagtacctggagctatgggcctcctctaaaatcaactatcgaagcccatctacattaggcacacaaacttgaccctgcaatctcaaaactccatcatcccgtaaggtaacttgcttggcacctccgtgctgcaccgtgtctctaaggacacataaatgaggatcatcatattgccgatctcggataagctccaacaaagaaaaatgagcgactgtgcaagctaacacacggctggggtcagcaacatccaacctcatgaactggttggccaaagcctgaacatccaaagcaagcggtctctcactgaccggaatataagcaagattgcccatactggctgacttcctactcaaagcatcggccaccacattggcctttcccggatgatataagatggtgatatcatagtctttcaacagctccaaccaccttctctacctcaaagttatctccttctgcttgaacaagtactgtagactcttgtgatccgtgaacacctcacatgccattccatatagataatgcctccaaatcttcaatgcgtgaacaatggctgccaactccaaatcatgaaccggatagttcttctcatgaatcttcaattgtcgcgaaacataggtgatgaccttgccatcctgcatcaacaccgcaccaagtccaacacgagatgcatcagaataaactgtataaggccctgaacctgtgggcaaaaccaacactagtgccatagtcaaaatgtcttgagcttctgaaagcttgactcacactcgtcagaccatctaaattgggcacctttctgggtcaacctggtcattggggctacaatagacgagaacccctccacaaaccaatgttaatagcctgccaatcccaagaaactccgaatctctggagctgatgctggtctacgctagtttttgactgcctcaatattcttcggatcaacctgaataccctctgcggatacaacatgacccaggaatgcaactgaactcaaccaaaactcgcacttcgaaaacatggcatacaactgactatccctcaaagtctaaacaaccactctaatatgttgctcatactcctcctggctacgggaatagatcaaaatatcatcaatgaagactatcacgaacgaatccaagtaaggcctgaacattcggtccaccaaatccgtaaaagttgctggggcatttgtcaacccgaatgacattaccaagaactcataatgcatgtaccgagtgtggaaagttatcttagggacatcggatgccctaatactcaactgattgtagccagatctcaagtcaatcttcaaaaataccttggcaccatgaagttgatcaaacaaatcatcaattctcggcaatggatacttattcttgattgtaaccatgttcaactgccggtaatcaattcacattcttatcaatccgtccttcttcttaaaaaacaccaccggcgcaccccaaggcgagacactaggtctaatgaagcctttttcaagcaagtcttgcaactgctccttcaactctttcaactcaggcggggccatacgatacgcggggtagaaataggctgagtgctcggagccaaatcaatgcataagtcaatatccttgtcgggtagcatacccggcaggtctaaaggaaatacctcagggaactcacgaacagcaggcacaaaatcaatagaaggaacctcagcactagaatcatgaacataggccaaataggccaaacaccccttctcgaccacacaccaagcctttacataagagataacactacgggtagaatgaccaggagtccctctccactctaaacgaggtaaacccgacaaggctaaggtcatagtctaggcatgacagtccaagatagcatggtaaggtgataaccagtccatccccaatatgacatcaaaatcaaccatgtccagcagaagcaaatctatacgagtctcaatacccccaatcacaactatacatgaatgatgtactcgatctaccgcaatagaatcacttaccggtgtagacacataaacaggagcactcaaagaatcattaggcatgaccagatacagtgcaaaataagatgacacataggagtatgtagatcctggataaataaaactgaagcatctctgctacaaactagaacagtacctgtgataattgcatcggaagccacaacctcgggcttggctggaagagcataacatcgggactgagccccaccaccctgaactacatctctgggatggcctgctactggctggcctccacctctagctacctgacctccacctctaatacctctacctccacctctaatacctctacctccacctctagcacctctaaccctacccctagctggtggagcaggcggttaaacacctggtgctagaaccatagtacgggaaccctgctgctgagaactgctcggtgctagagggcaatatctagcaatgtgcctcgtgtcgccacaagtaaaacaagcccctcgactgcttggtctgatgacactggaaactctgaagcggcgatgcagtgataggagttggtggtgcactataggactgttgatcagaatactgcatatgagaactacaactatctgaagcaccgtaagaaacttgaagtgctgactaaaaaggcctaggacgatggcctctaccatacgaatccttaccttcagacgaggtaccactgaatctgcctgaatgatgaggcctcttgtcagacccctgaccgcctccctacgatagaactatctcaactctcctggccacattggccacctcctaaaaagaaatgtcactccctatctcctaggccatctgaagtcgaataggctggataagtccctcaataaacctccttactctctctctctctctcggtgagaagtatgataagagaataacgtgccaagtcgatgaatatggtctcatactgagtaacaatcatagaaccctgctggagatgctcaaactgcctccgatagatctctctctgagtgatagggagaaaagtctccagaaatagctgagaaaactgctcccaagtcaaagctggcggtccggctggtctagccaagaaataatctctctaccaagtcttggcggatccagacgagcgaaaagtagcaaagtcgaccccaacagtctccattgtcaccatgttccgaagaacctcgtgacatctgcctaaatgatcctagggatcctcaaaagatgcaccgctgaaagtagtagtaaagagcttggtgaaacttatccaacctccacaaagcctctgaagacgtagctgatctatcacagatctgtgctgcttctcggctgaagaagaggtacgtgacctcgccattcgcgaaaggacaagagtaaagatttcgatttagcattgagagaacaaaaattgcatgacaggaaagaatagaagtgaagctttttcctaactttgtagcctctggggataaatacagacgtctccgtactgatcccttagactctactaagcttgtctgtgaactgttagacccatgtaacctagagctttgataccaacttgtcacgacccagatttcccaccatcgggagtcgtgatggcgcctactaacgtgagctaggcaatccgactatttgaaccaattacctttttaccccttttatattctttaacaattttaaatcaataacgtgtagacaacaaaatttacaataagcggaagaaaagaaatgaactatttgaatatgtatccaaaacaaatgcttgaacatagactacctagaactggtgtcacagtttcatagatggtctaaaaatactacataaaaagtctgaaagataaaagatacaatgtttttgaaataagtaaaagaaacaggataaagaaaagataggaggtgacgccaagccccgtggacgtctgtacaactacctcgggtcgcctgtgtggattgaagatagcaccctcaacgcggtccaatcactctggtatcagtatctgcatacagtgcagagtgtagtatcagcacaaccgaccccatctgctggtaagtgcctagcctaacctcggcgaagtagtgacgaggctaggaccagactaccaaataagcgtgtgcagttaaatcatattcagcggaaatataaaagcagaaaattacagttaaagatgggagggggaaaaaatgcttcggggaataacagacaacaacagaacatcaagaggaatataaagtaaccaaaatccaattactaacaaggataaggaaaacaaatgtagaattcactttcatttcacatcttgttgcaggcgtgcaacacgatcccatttcatatatctcgttgcaggcgtgtaacccgatcccatttcatatatctcgttgcaggcgtgcaacccgatcccatttcatatatctcgttacaggcgtgtaacccactccattttatatatctcgttgcaggagtgcaacccgatcccatttaatatatctcgttgcaggcgtgcaacccgctcccatttcatatatctcgtttcaagcgtacaacccactcacatttcatatatctcgctgcaggcttgcaacctgctcccatttcatatatcttattgcaggcatgcaacccactcccatttcatatattttcgtggcgacgtgccacacgatcccatttacaaatcaagaacaatcacaaaagaatcccggcaagggaacaagagaaatataacaacatcccgacaagagaacaataatatcaaaacaaacatcccggtaaaggaacaataatatgacaataacatcccggcaagggaataataatgataataacatcccgccaagggaacaataatgataatcctcatatgaaacgcaatataccacaacgtgtcataacaattacaatacaagactcacgggcaagcttgacaccgacgtatagatagtcgtcaccatgcctatacgtcgtactccacaattatcacgtagcaaataaggcacgactcctaatccatcaagctaaggttaggcaaaacacttacctcgatgccacgaacacaattcaagtctcaattattgctttacctcttgattacaccaccaattcgctcgtatctagccacaagttacttaattacgtcaataaatgctaaatgaatcaattctaatgcatgaaaataagttttccaaatgtttacccaaaaagtcaaaaatcgccctcgggcccacatagtcaaaatccgaggttcgaaccaaaacccgactacccattctcctaagaacccaaatatataatttatattaaaatcggacctcaaatcgaggtccaaattcccaatttttaaaaaccctaggttctacccaaaacacccaattttcgccataaaaatcattgattttgagttgaaatcatatgaaaagatgttaatgattaaagaaaccgagttaaaattgacttacaatcgatttggaaaagagttgtctttgaaaaatcacccaagggtgttttggttttgagagagtgtgaaaaatgaaagattttcggctaagttatgcaattgcaggttgcagatgtcgaaattgcgaccagggttcgcaattgcgaacacagacttctgctaagctcgaattggccaagtgaccctcgcatttgcgaggtcggaattgcgaacatacaatcacatttgcgataacaggcccaaatggggagtatcgcatttgcgaaggaaaaatctcgcatttgcgaggaaaggctggcctgggatgttttgcatttgcgagtcaggcttcgcaatgcgaagcctgcaagcctgcaatgaaacagctgaagcctgcaatttctcaagtccaaaatccaccctatggcgtatccaaaactcacccgagcccttggggctccaaaccaaacatgcacaccaacctaaaacatcatacatacttgcttgtacattcaaatcactaaaagaacgtcaacaactatgaatttaacatcaaaatcatgaaatttcttaagaacatcaaatttcccaatttcctcaaattaggtccgattcatatcatttcaagtccgtttcttaccaaatttcacaggttcgactcaaattatatataagacctataccggggcccggaactaaaatacgatcctgatactatcaaactttaaacacatttcactgtcaaaaactcataaatattccagaaaataattttcttcaaaaattcatttcttgagcttaggaccttggaattcgattccgggccttcgcccaagtcccatattttcctacggaccctccgggaccgtcaaattacgggtccgggtccgtttacccaaaatggtgaccaaagtcaacttaaatccattttaaagtcaaaattcattatttttcacagattttcacataatgactttacgactacgggcccggactgcgcacgcaaatcgagccaagacagaaagagttttttaaggcctcgaaacatagaattcatttttaaaacaagtgatgataggtcatcacaataacaaacaaaagtcaataacattagctagactccacaaactttaattgaaaaacattagagctaattccagcaaagtttgacatccgcaacagggaaacaaaatgaaaatcttttactacctatggaattgagaattcgttatgatagtaatcttgagaataaactaaagaagttattgttcagttcctttcttgaagtttagaaatatcactattgatatgttgccatatcagattcaattttgttaggcagcagttccctgatgcaccttcttatcagctacgtcggggggggggggggggtgactggacttagcagcttcatgggtatcatcatcttctttaaaaataaataaatcaacgaacacttgatatatttagctaaagaaaagaaataatgtcttaaatattaatatgttaggatttttttatcaacttcaagaaacaatattatttaccttgagattctccgatatgatctacgatgagtttatatctttgcatcctgagtggatgcaaggtgatagaagaactattatcccaatataatgtaggtgcttcctaccacgggaaatcataaagtaggacgcaaaaagaaggcaattaggaagcttttgggagagactatatctattcaaaattcagaggaaatagtcaaactcaactgaacaattgaaaagagaaactcggtagtggctaattatctaaagttctttctgaagtaatgcggataccaagcatacaaaatttataagtacaaaaattacctgtctttttcccctttagttctttttggttttcatttcttcttactctgttttctcctcctcttttccagccacctcttttactatcagccatgctcggattctcccactaacattgttccctccacccattttattttaattttattcaatttcttttagtttttttcacttgattcctcaagcatagtctattttttaaatttattttatccaaaaaatattcatgaaggttacatttgaaactcttcacactctttaacaggaggcaaaatattttttcataagtgctaaaaccaataaaaaaaaagttaatagtgctactgatatttagtattagttttgtattcacataatagaaacatccaaaatagaatagatgtcttggcgacatctactattgatcttaccaaatttaccgaagtgaaataaaaaggaacacattagtgtttaatcattcatatatcttctgatatggcatgtgaagagctcaagccatgctgtatctagaataatatcattataatcatgaggctacaataaaattgaaagcttactgggcaatcaatccaatggaaaatccacatcaaacgaaaacatttgaaaccataagcatgtgcaaaatgtgataaaagtcatatgtgcacttgcaggaatattttctccttttattcaaggagtcaatatatccatgctcgtgaattcctttatcttatcaaaaattgcagacaaataaaaataaacttctaggtatttttgtcttttatttaaatttttcctaattttattatcctgcacctcaagcaatatgaacgaattttcctactcaagcgctccattttggatgtagaggaaactaattctaagttttcataataatagtcagaaaaatcagaaggattttaagatagttgtactggataaagaatagctaaagctctgactacattagaggttattacgaacattgtatctgaagaattcacatgataatcaagcttcataagctcaagtttggctaaccaagaattctaaactaaaaatactaaacaggacttacatattatatattcttgttcgtggttctagtttcagcatcacccatatagtttcaggttttataattgcttcttccatttcttgttcaactatgattggaaacttcatttccttttatttctttcacccgcacttgttggaaacatatgttcctttttcaacataagataaaccaaaaagtctggcatgcatgttgtcataatttctccatattgattttttaaaattgaatttgaaacaattggtcctacagtttgtcacgaccccggttcgcgctccgtgaactatcgtgatgacacctagtctctacgacgaggtaagcctaaaatgcggaagataaaccaaatttgcggaagaaaataatttaaaacagaaatagagtaataaaatagtgtttaaaagtgtcgctcggcatacacaatattaactcttaaaaccaataaattttcccaaaacccggaaacccatgaatcacaagctaagagatacataagaagctctaactccaaaaatgtctaaccaaaaatggaatactgaagggctatactattacagaaagatagaaagggactcctcagtttggggacgcggaagatatacctcgaaatctctacagaagcgcctcgcctcaaggatgataagacagagtggaagtatctggatctgcacatgaaaacatatgcagaaggggcatgagtacaccacaacggtactcagtaaatgccaagcctaacctcggtcgggtagtgacgaggaaggtcagggccctactgaggttaaataaaatataaggtataacagtgtagaataagacagtataatgaagtgcaacagtaagaaataacatagaatagaaagaacaacgataactagaacagagacaaaataatcacgaaaaggaaatacaactcaagacagagataacaaccggggtaccctccaggataccgtcctgtagtcccaattacatctaaccagtggatctcccgggatactgtctcgtagtccatcatatgtatttgaacgatctctcgggatcccgtctcgtagtctaactatcagtgcgtggggatctatcgaaattccgatccgtagtcccaaatataaatacccagtactggaagaatctaccatgtgcagtctcgtagttccatataactgtgcagggggatctaccggaatctcacatccgtagtcccaattaaacaaacaagggagatctactgacatcccacatccatagtcccaaataaacagacaaaggggataatccacatccgtagtcccaaataaacagacaagggggatctatcggaatcccatatccgtagtcccaatgtaaatacacagcagcaaaaggaaaatattcagaaatggcaaatttcatattaaggcaaacaagtaattctagcctagcatgctgcacagaattcaggtaaggcagtttgagcaagtaaaccaatcaagtcacttagacatgctttcctaagctaacagcaggcttaatagtgcaagtaataaaaaacaggaaagaaatcatactagtaattacttaataaaaatcgaatttacaacaattagcacaagtatacactcgtcacttcacgtacaaggcatttcaattatcaaatacaccaaatcctaagggaaggtcccccacacaaggttagacaagccacttacctcgaaccggctcaataatcaatatgaaaccatgctcttggcatgagtactcgactctaaatgacccaaatctattcaattcaatatcataacgtaaataacacttcaagtaattgattctacaaagaaattctaagctaatacgcgaaattaagtaaaatgaccaaaacgtcactcgggcccacatcttggaatcgggtaaaatttatattttcagaaacctcgtaccctcacgagtctatacataacaagaatattgaaatcatagttcaattgacccctcaaatacccatgttaaggtctcttaatctcaagccctaattactcattttttccaaatttctcaccaccaattaggtctttaatcacatataaacgagttgtgaaatcaaaaatattacctccaagtgattcccgttgaatccctctttaatccccttcaaaaagcttcaaaatcgcccaaaaatggaggaacttaggctcaaaatcacggaataggcattttaaatcattctgccgaggcatttaaattcttcttcgcggacgcggtcaaagcctggcgttcgcgaagcacaaattgacgttgaccacttttccttcttcacaaatgcatccccttattcgcgaacgcgaaggctcagcttcccagctcatcgcgaacgcgtagttcaaagaccctagctcttcgtgaacgcgggacctccatcacgaacgtgaagtccataccttcagctccacatcctaacccttcgcgaatgcgagggtccattcgcgaatgcgaagaacaactggtctgcaacacacatagtagttttctgcaacttcaaacatcatgaaatggtccaattgaccacccgaaactcacccgaggccaccaagacctcaaccaaacttaccaacatatttcataacttcattcaaacttgttccaaccttcagaacacacaaaacaacatcaaaacacctatttttcatcggattcaaggctaagaattccaaaaactctaaaaatatgctttcgatcaaaaagtctatcaaacctcgtccgaatgacctgaaattttgcacatacgtcacattaaacactacggagctattccaacttctggaattacattctgaccctcagatcaaaatttcactatcgaaccggaaacttcaaaattcgacctttctacatttcaagcctaaattagctacagacctctaaaacacaatccgaacacgcccctaagcccgaaatcacccaacgaagctaacgaaaccattagatttcccttctgatgtcatctttgcactgttctgactacggtaaactttccaacacttaagctcttatttagggactaagtgtcccaaaactcttcgaaactcaaaaccgaacatcccgacaaatataaatagcagaaataaattcggggaaagcagttaatagcggatcagggcgttaattcttaacacgaccggccggatcgtcacacagttgttcttggacatgcttaacacacataatcttcattgaagatgaaacaattcaagttctttagatataaagagtaggagaagaaagctataaagagcatacatcgaaaataagaatactttgattccccaaagtattaattatatcccccaattggaagataccaaaaaatctcaaagtagctaaagaaattcaaagccctgctctgcagaactagtttgactactaaattaagtcagaaatatgaaaaagaattgatcaaccaattaaagatgaatattttatccatcaaactaacatcatctacagatgaagtagccatgaataagcaacctccccaacatgcctcaatatctcaaaagggcaaataaacctcagactcaacttctctttcttcccaaatctcataacgccctttataagagaaacccgaagcagaacccgctctccaaccatataggaaacaacactaaccttccggtctgcgtaactcttctgtctggactgggatgtacgaagtctatcctgaatcaccttaatcttctccaaagcatcgtgaactaagtttgtgcccaataatctagcctcacccagctcaaaccagcccaccggggatctacaccgcctaccatataaagccccatacaatgccatctaaatgctggactgatagctgttgttgtaagcaaactccgccaatagcaagaattgatcccaagaccctctaaactcaatcacacatgtatagagcatatcctcaagaatctgaatagtgcggtcggagtgtccgtccgtctgagggtgaaatgttgtactcaaccccacccgagtacccaactcatgttgaatggacctccagaaccgtcatgtgaactatgtacctttatctgaaatgatggatattagaataccatgcagacgaacaatctctcggatataaatctttgccaaccgctccaaagaataagtagtacacacaggaatgaaatgagtggacttggtcagccgatccacaatcacccaaataacatcgaactttctcaaagtccgtgggagcccaactacaaagtccatggtgatctgctcccactttcactccgcaatctctatctgctgaagcaacccactcgatctctggtgctcatacttcacctactgacagttgagacaccgaactacgaatccaactatatctttcttcatacgcctccaccaatattgctgcctcaaatcctgatacatcttcgcggcacccggatgaatggaataccgcgaactctaggcctcctccagaatcaactcccgaagcccttcaacattgggtacacaaatacggccctacatcctcattaccccatcatcaccaatagtcacatctcttgcatcaccgtgctgaaccttgtccttgaggacaagcaaatgagggtcatcatactgacgttccctgatacaatcaaataaggaagaccgagaaaccacgcaatgtagaacccgactgggcttcaaaagatccaatctcacaaactggctggctaaggcttgaacatccatcgccataggcctctccgatgctggtaaataagcaaaactccctgcccaacgactcaaagcatcggccaccatattggccttgcctggtgatacaaaatagtgatatcatagtccttcagcaactctaaccacctcatcaggcacaaatttagatccttttgcttgaacatgtgctgcaagctccgatggtcagtctaaatctcacagggaaccccgtataaataatggcgccagatctttagggaatgaacaatggaagctaactcaaggtcgtggacagggtaattcctctcatgtaccttcaactgtctggacgcgtaggcaatcaccctaccatgctgcatcaacaccgctccaaggacaatcctcgaggcatcacaataaaccgtataagaccccaaacctataggcagtatcaaaattggggctgtggtcaaagctatcttgagcttctgaaagctcgcctcacactcctccatccactggaatggagcacccttttgggtaaacctggtcatgggggctgcaatcgatgaaaatacttccacaaaatgatggtagtaacccgccaagccaaggaaactgtggatctctatagctgaggatggtctggtccaactctgcacgacctctattttcctcggatccacctgaataccctcactcgataccacatggcctaggaatgccacggagtccaaccaaaactcacatttccagaacttagcatataacttctcctctcttagagtctgaagcatagtccttaggtgctgctcatgatcttcccgacaccgggaatacactagaatatcatcaataaagacaatgatgaacgattcaagatacaaccggaacacactgtgcatcaaatgcataaaggctacgggggcattggtcagcccaaatgacataacaaagaactcgtaatgactataccgagtcctgaaagcagtcttcgtgatatctggctcccgaatcttcaactgatggtaacctgagcgcaagtcaatcttagaaaacacccgtgcgccctgaagctggtcaaacagatcatcaatacaaggcaaaggataacggttcttcactgtaactttgttcaactagcgataatcaatacacatacgcatagaaccatcatttttcttaacaaacatgataggagcaccctaaggtgatacactaggccaaataaaacccttatcaagcaattcctgtaactgatccttcaactccttcaactcaggaggatccatgcaatacggaggaatataaatgggttgagtgcccggcaacatatcaatgccaaaatcaatatctctatcaagcggcatgcttggaagatcagctggaaacacatcgggaaaatcccgtactactgggactgaatcaactgaaggggtatcaatactgacatctctcacataagctaaatacgcgtcacacaccttctcaaccatatgctgagatttaagaaaagaaataaccctactgggagtgtgatctaaagtacccctccactcaacacgcggtacacctggcatagccagcgttatggttttggcgtgacaatcaagaatagcataatgaggcgacaaccagtccatgcccaagataacgtcaaaatctatcatactgagcaataataaatcggctctggtcccaaaaccactaagagcaaccaaacacgaccgataaatgcggtccacaataagagaatctcccataagagtagaaacgtaaaaaagaaaactcaaagaatcttgaggtacacccaaatgcggagcaaaataagaagacacataagagaaagtggagcctggatcgaatagaaccgatgcatctttgtgacaaaccagtataatacttgtgatgacagaatcagaggcaacaacctccgtacgtgtaggaagggcataatatctggcctggcctccccctctagggcgaactctaactccccgacctccacctctagctggctgggcaggtggggtagcaactggagctgtaaccatatcctgagaactctgcagggcacgctgtggctgagaagtctgtggaggtgcacccctcccaagtctggggcaatccctcaccatatggcgtgtgtcaccacactcaaaacaagctttgggaagacgtgggggctgtgactggctcaggctaggactgctggactgacctctgaaagcaccccgtagaggaggcgcgctagaaatcggaggtgcataataaggctcctgaggcctaggaggagctggaccactattggctgctgcaagagctgaatgaactcatataacccctaccatgatgacctgcagttggggcacgggcaccagaataatggcccgactctcgagacctcttggcctccctctcctctctttccctagcatgcataccctcaatcctcctagcaatgctcaccacctgctgataaggaaaatccatctccaactcacgagccatgctagacctgatactaggaataagtagctcaataaactggtgaaccctctcgcgaacagtagaaaccaaggctggtgcatgtctagccaagctagtgtaacggacatcatactctgagatagtcatagcacccaggcgaaaatgctaaaactcagtgcgccacgcatctttgaggctttgaggaacaaactctattaagaatagatctaaaaactgggtccaagtcagcaaagaagcctcgtccggactgtctaactcataggtgtgccaccactcataggcggctcctcgaatttggaaagtagtgaaggaagccccgctcgattctgatatacccatggtacgaagaatgcggtatcactcctccagaaatcccaaggcatcatatgattctaacccactaaatacgggaggatcatacttcttgaacctctcaagtctccgctgctcatcctccgaagtcgatgccctatcctcgggttggcctggggctacaagaataatctctaggacctgatcaacgtgcactcgctgctcaggagtgcgggcagcaggagtctgtgctcctcccccggcctgagatatggctgcagcaagggaaagcaaccctgcctgagccaaagaggtgtacatgctcatgaactgcgctagagtctcctgaagtgctggagtagtagtagcaatatgcgtatcaggtgcctggactccagctggaactgctggtggtacctcggcggtagctcgcgcaggtgctctggctacaccacatgcgcgtcctcgacctcttccccggccccgaccctgacctctaacgactgcagtaggggcgcgagtgcctggtcatctcgggtagcacgtgtactcaccatgtgtgagagaatataagacaaaagtttagaattgtgatgtcaaaatatcgcacgacaaggaaatccaatgaagtggaaattttcctaacagtgacatagcctctcatagataagtacaggcatctccgtaccgatcagcgagactctaataaaccggcttgtgatccatgactcctatgaacctagagctctgataccaacttgtcacgaccccggttcgtcgttcgtaaaccattgtgacgacacctagtctctacgattaggtaagcctaaaatgtggaagataaaccaaatttgtggaagaaaataatttaaaacagaaatagagtaataaaacaacgtttaaaagtgtcgctcgacatacacaatattaactcttaaaaccaatacattttcccaaaacccgggaacccatgaatcacaatctaagagataaataagaatctctaactctagaaatgtctaaccaaaaggggaatactgaagggctatactattatatcaagatagaaagggactcctcggtctgcggacataacaaatatatctcgaagtctctacagaagcgcctcgcctcaaggatgataagacagagtaaaagtacttggatctgcacatgaaaaacatgcgcagaagaggcatgagtacaccacagcggtacttagtaagtgccaagcctaacctcggtctggtagtgacgagaaaggtcagggccctactgagtttaaataaaatataaggtataacagtgtataataagacagtataattaagtgcaacagtaagaaataacatagaatagaaagaataacaacaacaactagaacagagacaaaataatcacggaaaggaaatacaactcaagagagagataacaaccggggtaccttccaggataccgtcttgtagtcccaattacatctatccagtggatctcctgggataccgtcccgtagtccatcatatgtatccaaaagatctctcgggatcccgtcccgtagtccaactatcagtgcgcggggatctaccggaatcccgatccatagtcccaaatataaatacctagtactgggagaatctgccatgtgcagtcccgtagttccatataactatgtagagggatctaccagaatcacacatccgtagtcccaattaaacagacaagggagatctaccggaaacccacatctataatcccaaataaatagacaagggggatctaccggaatctcacatccgtagtcccaaataaacagacaagggggatctaccggaaccccacatccgtagtcccaatgtaaatacacagcagcaacaggaaaatattcagaaatgacaaatttcatattaaggcaaacaagtaattctagcctagcatgctgcacagaattcaggtaagacagtttgagcaagtaaagcaattaagtcacttagacatgctttcctaagctaacaacaggcttaataatgcaagtaataaaaatagaaaagaaaacatactagtaattacttaatgaaaaacaaatttacaacaattagcacaagtacgcactcgtcacctcacgtacaaggtatttcaataaccaaatataccaaatcctaagggaatgtcccccacacaaggttagacaagtcacttacctcaaagcggctcaataatcaatcctaaaccacgctcttgccacgagtactcgactccaaatgacccaaatctattcaattcaatttcataacgtaaataacacttcaagtaactgattctacaaagaaattctaagctaaaatttacattttcagaaacctcgtaccctcacgagtctatacataacaagaacactgaaatcagagttcaattgaccccctaaatacccatgttaaggtctcttaatctcaagccctaattacccatttttcccaaattcttcaccaccaattaggtctttaatcacatataacgagttatgaagtcaaaaatattacctccaagtgattcctcttgaatccctctttaatccccttcaaaaagcttcaaaatcgcccaaaatggaggaacttaggctcaaaaccgcggaataggccttctaaattattctgccaggtatttaaatccttcttcgcgaacacggtcaaagactggcgttcgcgaagcacaaattgacgttgaccacttttccttcttcgcgaacgcgcccctttattcgcgaacgtgaaggctcagcttcccagcccatcgcgaacgcgactcccttctcgcgaacgcgtagttcaaagacctcatcccttcgcgaacgcgggacctccatcgcgaatgcgagggtccacttatgaacgcaaagagctactggtctgcaacacacacatcagttttctgcaacttcaaacatcatgaaatggctcgattgaccacccgaaactcactcgaggcccccaggacctcaaccaaacctaccaacatattccataacttcattcaaacttgttcgaaccttcggaacgctcaaaacaacttcaaaacacctatttttcattggattcaagcttaagaatttcaaaaactctaaaaatatgctttcgatcaaaaagtctatcaaatccaacggagcacacacgtcacattaaacactacggagctactccaacttctggaattccattccgaccctcagatcaaaatctcactatcgaaccggaaacttcaaaattttacctttcggcacttcaagcctaaattagctacggacctccaaaatacaatccgaacacgcccgtaaaacaaaatcacccaacggagctaaggaatcatcggatttccattccgaggccgtctttgcattgttccgactacggtcaactttccaacacttaaactctcatttaggaactaagtgtcccaaaactctccgaaactcaaaaccgaacatctcggcaaatcaaattagtagaaataaactcggggaaagcagttaataggggatcggggcattaattgttaatacgaccggccagatcgtcacacagttgttcttggacatgcttaacgcatataatcttcattgaagatgaaacaattcaagttctttagatataaagagtaggagaagaaatctataaagagcatacataaaaaataagaatactttgattccccaaagtattaattatatcccccaattggaagctgccaaaaaatctcaaagtagctaaagaaatgcaaagccctgcagaacttgtttgactactaaattaagtcagaaatataaaaaagaattgatcaaccaataaaagatgaatattttagccatcaaactagaatcatctaccgatgaagtagccatgattaattctaaatttataggtactgaaattttagtagacaatatgtataattggttgaatatataccttgacgaaaattgttgggtagatttcttaagctgtcattgaaagcaacttttctccaagatcaccagaaattgtagcgattgttaactcactttcatcagtaagatcaatttggaataattactcacgggacaaagtaaaaataatcactcacatgaacaatataccactgaaactactttctaaagaacatcattttagcatcgactctagtccttcgagaaattgaaaaaaaaaacatacagttaactcgccgaatcaaattacaaaaggaattatacagagttaaagaaagtaagttgatggtttccaataattgaatggctggttcttcaacagtaagcaactgaattacaaaaacaaactcaatccatacaacataaataataacacatattaatagcataaaaatctcaattaatgttacacactcaaccatcattcgtttctcccaaattctagcaagtctaactaataggtcaataaagatgggaagaaatcaccagcaaaataaatctcctaaagattactgatctgtgaggattgaatcacatgcataaaatataagttagagacgcaaaatgtaatcagggaaaacaatcttcaatctctgttgcactaaggatcaaataccagacatgtatgagaatatcagaccaaattactgacatgcatgtagaaaatccaacaataaactaccaaaaagaacccaaaaagggagtgagacagaatgagagagagagagagaatataggaaactaacatacatccagcagatagcgattagcaacgaaaaaggtgcaacaaacaataaaacagatgcaaagaaaaactcaccaaaacaaagttcacactttgaattagtgaacatcggatagagaatcagaaaatatttgagaaactctcaaaaaggagaaacggatcagttagatagagaagtaaaagaaaaggggataggattcgacaatgaccatggtagagtatcaaaacaagcaagacgcgtgtttatagcgtatcagtaaaagtctttagaactaatattataagtattaccaatttaaccttagaagagttcgcaatgctaagagtacaacgcttaaaactttttgtacaaccacctagagcagtgttcgtcctttcaaactctcatttctaaatagtagaaaaatactagtatctacttcatggaaaaaaaaaaaacataaatgatcactagagataatacatttgaactccaaagaaaatggacataatcagtaacagaataaaaatactccataaaatatctaaatttcctaagaaaaaacttaaaaaatatatttaaaaaaatatacattgaaaacatattaaaaataggaaaaatagttttaaaaaacagaaaacatacctctaagaaggaggaggaccggtcgaaatgaagacgaaaggggtttttgccttttattttccgacgatcgatgacttattatcgccaaatataattattttaagaaatttagtgaaagtcgagtgattttgtgtttagaaaaataagtttaggattttcgtgcaattataaactgagtgactgtgtaattaacccttttgtaagagttgaactctctgaagatataagtgtgtgtatttatttccctcttacatcctccaaaatgataatgtaagatgagcataaggacaactttcacctaattgtgactgaaatatgtaggagctgcctgtactgtagtaagtccatatgctagctattgataatgttaggatccgaaactcaggtagtgcggaatttagccaaataatattataatgtcaataataaagacaatgtaagttgataacaacgacaaaaaaaagataccaatttaatatggttcagtcagtgtgacctacgtccacaagcgaagaagagcaatttcaccataccaataagagtacaaaattagaataaatactctaattaatcccaaatacccgaagagaataacccactagatcactccaaagaaagggttcacataaatatttcctaacacttaactctcatacaaaatactcttaataactaaaggaggagaagaagaaacaagaaatgaagactcaagtcttgttggtgtgtctaaaatgaactaatggtctttggttttgtaggcaaaaaagccttggcctccaaggtgtaagagaaaagatacagcttgtgcaaatgatatctattacacaatgcaatatttttgggtcccaaagaatattatcaacaaggtctactttgcaaatatacttatgcttatgtgagatggagttcactaaccaaaatattggttatattacaaataataaaccacaaaaggaattccaacaattaaaaaatcttttatatatatgatgagagacaaaggaaaggaaaggaaatgatgagattccaatgttcgtactgcaataacatctgaaaaaaggaaatcaatacatgtcaaagttgaactctatataggagttttaggctaagaacgggaaaaaaaggagaattttagaaacagtaataagaaaaatgtaaaaagagaaagaaggatcaaattactatttacagctaattagaatattacatgtagtatcagcacaaagaattaagtaatataaagaaactagtctgtgaaatcgtttcagtgaactgcttcttggatcttggaaaatacagcttaattcctggtactagacggaattcaaacgcgttctttgacgtaatcgtagagatctgcaataagaaagaaaagccaataactcctattatattctttaattttccaacaaaattaattatattcttggtggaaaaactaaataaagtgttacttatataggatgccaaagtatgagaaagggaagggagcctataaaatatgaacatatatacagttgaggagaaaataaaggaaagtgaaaaacaacaattaattctgaaagtcgttaccttcatatatatatatgcgaagagcaagacaatcacttcccgccatggcagctacttcctcctgaatttctctggctgaatccacaattagaccgcatttatacaactcaattgactccaaggtgtatgtatctgcaaaggctataggaattcgcctaagaatcttgattttctccaatacgaggcgttgaagatttggaaagttaacattggtagcctcccagagttgtgtctctgtgtcatcaagtagaaggaactttagctgcttgaactcatcttcctcctttaatttccatacctcacctctgaatgcatgacatctaagtttgagtagttggagatttggtaacttggcaagatttgccatgtcttcccagggaagccaacttccagatagggtcaatctctttagcgatattgggaaacaacatttagccagagagagttcccttcatcaaaggaacactctaatactcggagtttattcaagtagagcaggctccaacatgtttcctctaatgctttgtatttttccccgatatcatagatacgtaatttctttagatgaggaaggccaagaaatacctcttttgtacagctagcaagacagagactggaaagctcctgcagatgttgcagacccaactcgtctaccacatatgggttgggcaaataagtgctaccatgtagacggagatgcctcagctgcttcatattccagatatggttaggtaaagttaaaattccacgccactccagattgtgatgaacaaaactaaaggtttgcaggttatgcatatattcaagtgattcagtaaaatgattgtctatgtgaatctcaagatagctgaatctaaggtcatgcgacgcctgaagatgaaatgatacctaggaatggcagccaacaccctcaaagctttgaattccaatggttttcctattgttttatgaggttccttgaaaagatacaagcaacgcaaaaattttgctgacttggtaaagttttcccctgaaatgcgtgtatgcaaactaaagcgaggagtctcataatgaaaattaggaatttgattagttctaaacacatccggaagcgctcacatccccaacaagtcatgcatacggcaaatttttgatccggccattgagtttcccccttttgaccattattaaatttctgctagccagatcttccaaacaatcctctgccactttttccaggcttctcagcttatccctcttcagaaaaccctctgcaacccacagacgaattaaccgccaagcatcaatctcagaatcctcagggaatgctcccatatggaggaaacaaggtttgaggtgaataggcaggtgatggtaactgatcgcaagcactgctatgcattcattcggataacttgtaacaacttcattcacattttcagatacagttacccagttttccctttttggggaaatcctagagagatgcccagcaaccaccaaaattgctagaggcagtccctggcatttttgtactattttcttcccgatatcttctaattcagaatgacaattaatgtggcttttccccaacaacttattctgaagtaacttccaactctcatctacccctaacggcagcacttcaagaggagggatatcagggttagcatactcagccacatcttttagcctcgtagtcagaatgattcgacttccattattgtcatcaggaagggttctcgcaatcaaatcccaaatctttgtactccaaatatcatcaactacgataagatacttccgacccttaagtgctttatatgactggtccattaactggtcatcactcattccctgaaactcgtatcctgtaaggctacgtgcaaggcttggcaacacttcgtttaagtgatattcttgagatatagtaacccacgtttggatgtcaaaatgtgatctaattgattgatcatcttgagcctttttagcaagtgtggtattgccacatccacccattcccaaaataggaatgacgttctgctcagaagctaatccaagtagtgcatcagtgagttttctcaaggaattcgccaaaccgactgtatcatcatcatcatcatcatcacctagaagggaagtaggagcaaggtttgaagaagaaccagctaccagagaatgtccctttttgaagaaatgatcctcatcatcaggggggccaaggcaacgagcataggtttcagtggagaaggagttaatccgcctcacctatttctttacagcatcaatcttgtctaccgcttgaggcaagactcgaagaagaacccctacttcatcctgaaaagtctcgtcaatattattctcttcttgttgcctccatcattctctcataatttccgcaacatttgattcaagcacatcttcagcttggtgcatcgctgatcttatctctgcctcaaaatatttgaatgtatcatattcctgtttctggtggctagcgttctcaagaatattttgaaaatattcagcactggcatggagagagtcaatcatctctgcagtttgaccatggatcaatgctggataagtcttttggaatagctccaaagtttgaattaaagagttcactgcaggataagccattactttcaattactcagtgggagagaaatgctttcaagatttactataagctctttcgaaacttatactagctagctagcacttaattttcagatcagcttggtcaaacagcaatttggaaagccaaatgggtgttcatggaggatggttctattttcaacattagtgcaaaagaagcctatttaaactaattagtgcaaaataagtctacttaaactaataagcgaaagagaagtggccttctatttaaaaattaaaataaattgatctatttaaactaaccagcgcatgcaagagaagtttacttaaactagaagtctatttaattacgacaaatggccaaatatacctttgtactgtaacaaaaaatttaaatataccctttgttataatttggatccaaataatactattgattctaatatactcctcttcttttaaaaatgttcaaggtggacattcaatcctacgtgacactgatatttgatgaggtggatgacacatgacataccacctcagcgcccataatccatatataaaagactaaaatttgaaatacaatattttttatggtagcgataatggtagcaatggtggtgggggggaggaaattttagtggtgaaaacaaaataggaggggtaaaatgggttaggggcgctgaggtggcaagccatatgacatccgcctcatcaaatatcagtgccacataggattggatgtccactttggacaaacttaacagaaaaacagtatatttgaaccaatagcataacgatatgggtatatttggactcaaagtataaagacagggtatatttggactcaaagtataacgagaggtacatttaagagcccgaaaccaaagtgtggtctttttggagtcaaacaaccaaaataggtgaaaaaaataacggattaccattttatatatagcggggttattcacggcgctataccttaacgacacgtttatccgaaaagcttttatgtgaaaatatgagatatagaaatttctagagttaaaatttgaatatggttgactttggtcaacattttgagcaaacggacccggatctgtgttctgacggtcctgggaggtccgcagtaaaatatgaaacttgggcgtatgcccggaaatgaattccgaggtcccaagccttagaaataagtttttgaaaaaaattattttgctgaattatttatgaaataaagaaaagaattaatgattgaaaccattggtatcgggcccgtattttggttccgtagccctgtacaaacttgttaaagtatttaaatgataattgtgaaatttggtgaaaaatggagttatttgacgtgatttggacctcaggttgaagagttatgaactttaagtgttcttgatgaaaatgatgagttttgaggattaatacatagttttacatgttattttcatgatttgattgcatgagtaagtccgtatgatgtttttggattagtgtgcatgtttggtttggagccccgagggctcgggtgagttttggataggccatagagtgaaatttggacttaggaagttgcaggttttagctggtatgttgtaggtctgcaggcttcgcaaatgcgataatcgacctgggctaccttagtcgcaaatgcgattgttctatcgcaaatgcgaaggtgatcgaaaattaaactgggtcgcaaatgcgaagggctcagttttctgaggggttcgcaattgcgaaccctgatcgcaattgcgacacctgtaacctgcaaaatcataacttagacgtatttcaacaatttttcaaaccctttcaaaaccaaaacactcttgggcgatttttcaaagacaaacactcttccaaatcaattgtaagtcatttctaacttgtttttattaatttttaacatcttttcttatgatttcaactcaaaattaaaggttttcatagaggaaattgggtgttttgggtagaacctaggtttttcaaattttggggatttggacctcaatttgaggtccgatttcaaaataaaatatatatttgggttcgtggaggaatgggtaatcgggttttggttcgaaccttgggttttgaccatgtgggcccgggacgattttttgactttttgggaaaaaactttagaaaacatattttcatgcattggaattgattcatttagcatttattgatatagttaagtaacttgtggctggagacgagcgaattggtggtggaatcaagaggtaaagcgatagttgaggcttgaattaactgcacaggtttatttggtagtttggttctagcctcgtcactacttcgctgaggttaggctaggcatttactagcacatggggtcagttgtgctgatactacactcttcaatgtgtgcagatacttataccggagcatttggaccgcactgagggtgttgtctttagtccattcaggcgacccgaggtagtctattcaggcgacccgaggtattcagagacagacttatgtatttcattcagaccttatttgtagtattcttagatagtccgtgacttgtgacaccaaattctgggtagtattgtactttaaattatgtagcagtgtttggttgaattattaagttttcgtattccgcatttctggttatttaatttatttcgctgtttaatcacttattattttaaattgtcgaacatttttaataaaaagtgtaatgattttataatattcggcttgcgtagcttccacgagtaggcgccatcacgactctcgagggtggaaaatccgggtcgtgacaagttggtatcagaactctaggttacataggtctcacaattcacagacaagcttagtagagtctgagggatcggtatggagacatttgtatttatccccagaggctacagagttaggaaaaacttcacatctattctttcctgtcgtgcggtctggtttctcaatgctaattaaatttctactttgttctttcctagatggcgagaacacacgcttcctcatcaattgataagcagcccgagcccccagcagcagctcccacgaggggcagagggcgaggccgaggtaggggcagagctcagcctagagcagcagcaccagcggcggagcctcaggttgagtttgatgatgaggttacgacccaggaagttccggtgggcctagctcatgtctcagaggggttcattgctaccccagtactccaagatgctctggtccgtctagtgggccttatggagagtgtcacccgggcatacttgcttcatcgtagcaccaaccatctctcaagctggaggaggagcccaaactcctactactcgcacttcggagcagatggctccccagtttcagactctaacaactcagccagttggagcagttcagccggatgtggtagctcagaccggtgatagagcagctatgtctgtcgatgccttgtggagattggacaggttcaccaagctcttcactaccacttttagcggtgcatctttggaggatccccaggattatttggacagatgtcatgaggttctcaggaacatggggatattggagaccaatgggatcgactttgctactttttgcttatctggattcgccaagacttggtggagggattattgtttggccagaccagttgggtcaccagctttggcttgggatcagttttctcacctttttttggagaagtttcttcccgtcactcagagagagatctatcgaagacagttgaatgtttccaacagggttctatgactattactcagtacgagaccaggtttattgatttggcccgtcatgatctacttatactccccattgagagagagagtgaggaggttcattgagggactcattcagcctattcgacttcagatggatgaggagacagggagtgagatttctttccaggaggtagccaatgtggctaggagagttgagatggttctatcgcagagaggtggtcaggagtctgataagaggcctcgtcattcaggcagattcagtggcgcctcatctggaggaaaggatttgtatggtagaggccaaccttctaggctttttcattcagcacttcaggtttctcacggtgcttcaggtggctgtggtcctcatatgcaatattctgatcagcagtcctacagtgcaccaccaactcctatcagtgcaccgtcgctttagagttttcagggtcgtcagtcccagcagccgagggcttgttttacttgtggcgacacgaggcatattgctagatattgccctcgagcaccgagcagttctcagcaccagagttcccatgccatggttcaggcatcgagtgttccaccgcccgcccaaccagctagaggtaggggttgaggtgctagaggtggaggtgctagaggtggaggtataggtattagaggtggagctcaggccgctagaggtggaggccagccagtagtagtccatcccagagatgtagttcagagttgtggggcccagcctcgatgttatgctcttccagccagacctgaggctgaggcttccgatttagttatcacaagtactattttggtttgtagtagagatgcttcagttctatttgatccaggatctacgtactcctatgtgtcatcttattttgcaccgtatgtggtcatgcctagtgattctttgagtgctcttgtatatgtgtctatcgctataggtgattctattatggtagatcgtgtccatcgttcatgtatagttgtgattggggggtcttgagactcgtgtatatttgttacttctggacatgattgattttgatatcattttggggatggactggttatcacctcaccacgcgatcttggactgtcatgccaagactgtgaccttagccttgccaggtttacctcgtttagattggagagggactcctggtcattctacccatagtgttattttatacatgaaggctcgaagtatgatcgagaaggggtatttggcttatttgtcatatgttcgtgattctagtaccgatgttccttctattgcttctgtgcctgttgttcgtgagcttcctgaggtatttccttcagacttgccgggtatgccacccgacagtgatattgacttctgcattgatttggctccgggtactcagcccatttcaattctattgtatcgtatggccccgcttgagttgaaagaattaaaggaggagttgtaatacttgcttgagaagggcttcattagacctagtgtctcgccttgggcgcgctggtattgtttgttaagaagaaggatggatcgatgcgaatgtgtatagatttccggcagttgaacaaggttacaatcaagaataagtatccattgccgaggattgatgatttatttgatcaacttcagggtgccaaggtattttcgaagattgacttgagatctggctaccatcagtggatgattagggcatctgatgtccctaagacagatttctgcactcggtacgggcattatgagttcttggtgatgtcattcgagttgacaaatgccccggtagattttatggatttgatgaatcgagtattcaggccttacttggatttgtttgtgatagtcttcattaatgatattttgatctattcccacagctgggaggagcatgagcagcatctgagagtagtcctccaaactttgagagatagtcagttgtatgctaagttttcgaaatgtgagttctggttgagttcatttgcattcttgggtcatgttgtatcagcaaagggtattcaggtagatccgaagaagatagaggctgtgaagaactggcctagaccagcatcaactacagagatccggagtttcttgggattggcaggctattatcgtcggtttgtagaggggttttcatctattgcagtcccgatgaccaggttgacccagaagggttcctagttcaggtggtcggacgagtgtaaggcgagctttcagaagctcaagacagctttgactacgacgccagtgtttgttttgtccacaggttcaaggccatatacagtttattgtgacgcatctcgtattggacttggtgcggtgttgatgcaggatgacaaggttattgcatatgattcgcgtcagttgaagattcatgagaagaattatccagttcatgatttggagttagcagccattattcacgcgttgaagatttggaggcattatctatatggcgtgtcatgtgaggtgttcacggatcacaagagtttacaatacttgttcaagcagaaggagctaaacttgaggaagaagatgtgattggagctattgaaggactatgatatcaccatcttatgtcatccgggaaaggccaatgtggtggccgatgctttgagtaggaagtcagccagtatgggcagtcttgcttatattccggtcggtgagagactgcttgctttggatgttcaatctttggccaatcagttcgtgaggttggatgtttctgagcccagccgtgtgttagcttgcatagtcgctcattcttctttactggagcgtatccgagattagcagtatgatgatcctcatttgtatgtccttagagacacggtgcagcacggaggtgccaaacaggttacattaggagatgatggagttttgagattgcagggtcgagtttgtgtgcctaatgtggatgggctccgggagttgattttagaggaggctcacagttcccgatattctattcattcgggcgccactaagatgtatcaggatttgcggcagcattattggtagaggaggatgaaaaaggacattgttgcatatgtggctcggtgtttgaattgtcagcaggttaagtacgagaatcagaggcctggtggtttgttccagaagattgagattcctgagtggaagtgggagcgtatcactatggacttcgttgttggactcctacagacttagaggaagttcgatgcagtgtgggttattgttgataggctgaccaagttagcacatttcattcatgtggcagtctcctattcttccgagaggttagctgagatctatattcgggagattgttcgtcttcatggtgtgcctgtgtctatcatttcggaccgaggtacatagtttaccttacatttttggagagcatttcagcgagagttgggcacatgggttgagttgagcacaacatttcatcctcagacagacgggcagtccgagcagactattcagattttggaggatatgctacgagcttgtgtcattgactttagaggctcgtgggattagtttttgcctttagcagagattgcctataacaacagctactagtcgagcatccagatggctccttatgaggctttatatggtaggcagtgccgtcgccagttggatggtttgagacggaagaggctcggttgttgggtatagatctagtacaggatgccttggacaaggttagtatcattcaggatatgcttcgtacagctcagtccaggcaaaagagttatgccgatcttaaggttcgagatttgtcattcatggtcggtgagcgggtgttgcttcgggtgtcacctatgaagggcgtgatgagatttaggaagaggggcaagcttagccatagattcattggcccatttaagattcttgatcgagtggaagtggtggcttacagacttgcgttgccgccgagattatcagtcgtgcatccaatgtttcatgtgtccatgcttcagaagtatcacggctttccatcccacgtgctatatttcagcattgtccaattggacaaggacttgtcctatgaggaggagccggtagctattctagaccagcaggtttatcagttgagatcgaagaatttatcttctattcgtgttccatggagaggtcagcctgttgaggcatcaacctgagagtctgagtccgatatgaggagcccctatccccatcttttccccgactcgggtacttccttcttatgtctgttcgaggacgaacggttattttagaggtggaggatgtgatgacccaaaaggtcatcacttgtgttagaaacaaattctgtgttccgaggccttaaacttcctttttacctcacctcaatttgcgtgcatggtctggacgtatatccggaaagcttttatgtgaaaatatgagagagagaaatttctagagttaaaatttgaatatggttgaccttggtcaacattttgagcaaacggacccggatctatgttccgtcgatccccggaggtccgtagcaaaatatgagactcgggcgtatgcccggaaatgatttccgagatcccaagccttagaaattaatttttgaaagaaattattttgctgaattatttataaaataatgaaaagaattaatgtttgaaactattggtatcaggcctgtattttggttctagagcccggtacaaacttgttaaattatttaaataataactgtgaaatttgttaaaatagagtttatttgaggtgatttggaccttcggttgaagagttatgaactttatgtgttcttgatgaaaatgatgcgttttaaggtttttttttttagttttgaggtttaattcatagttttacatgttattttcatgatttgattgcacgagcaagtccatatgatatttttgggttagtatgcatgtttggagccccgaggactcgggtgagttttggataggctacggagtgaaatttggacttaggaagttgcaggtctgcaggcttcgcaaatgcaaagcttggctcgcaaatgcgagagagcatcgcaaatgcgataatcgacctgggttgccttagtcgcaaatgcgactgttctatcgcaaatgcgatatcgcatttgcgaaaggtccctcgcaaatgagaaggtgaccggaaattaaactgggttgcaaatgtgacattatcttcgcaaatgcaaaggtgtcaattttctgaggggttcgcaattgcgaaccctgatcacaattgcggcacttgcaacctgcaaaatcataactaagacgcacttcaaccattcttcaaaccctttcaaaaccaaaacactcttgggcgatttttcaaagacaagtactcttccaaatcgattgtaagacatttctaacttgtttttattaatttttaacatattttctcatgatttcaactcaaaataaaaggtttttatgggggaaattgggtgttttgggtagaacctaggtttttcaaattttgggggtttggacctcgatttgaggtccaatttcaaaacaaattgtatatttgggtttgtgagagaatgtataatagggtttttgttcgaaccttgggttttgaccatgtggacccgggggtgatttttgaatttttaggaaaaaacattagaaaatttattttcatgcattggaattgattcatttagtatttattgatataattaagtaacttgtggctagatacgagcgaattggtggtggaatcaagaggtaaagtgatagttgaggcttgaattgtgttcgtggcatcgaggtaagtatttggtctaactttagcttgggggattaggagtcgagtcttaatttctacgtgttaactgtggagtacgatgtataggcatggtgataagtatctatacgtcggtatcaagcatgcccgtgaatcttgtattgaaattttatgactccgttgtagtttattcgtgcttcatatgagaattatattattattcccttgccgggatgttgttgtgatattattgttcccttgctgggatgttgttataatattattgttcccttgcaggtatgttgttattatactattatttccttgccagaatgttattgttacattattgttcccttgccgggatgttgttgttatactattgttcccttgccgggattcttttatgattggtgttgataaatgaaataggagcgggttgcacgcctgcaactgtaatatatgaaatgagagtgggttgtacgcttgcaacggtaagatttgaaatgggagcggcttgtacgcctgcaacagtaatatatgaaatgggagcgggttgcacgcctgcaacggtaatatgtgaaataggagcgggttgcatgcctgcaacggtaatatgttaaatgggagcgggttgcatgcctgcaacggtactatatgaaatgggatcgggttgcacgcctgcaacggtattacatgtgtacttgttttccttatttccttatcttttgctggtaattgatttatggcgttccttacatttttctactgttattctgttattatctgttactccccacaacatgtttcccctgcccaactttaacagtaattatctacttttatttccattgtatatgatttaactgcacatgtttatttggtagtttggtcctagcctcgtcactgcttcgccgaggttaggctaggcacttaccaacatatggggtcggttgtgctgatactatattctgtactgtatgcatatactgataccggagcgtttggaccgcagtgagggtgctgtcttcagtctatttaggtgactcgaggtagtcctgcatgcatccgcgggccttggcgtctcctcatatcttttctctttctgtttttacttattcagagacagacttatgtatttcattcagaccttatttgtagcattcttagatgctccgtgacttgtgacacaaaattctggatagtattgtacttcaaattatgtagcagtgtttggttgaattattaagttttcgtcttccgcattttcggttatttaagttatttcgatgtttaatcacttattattttaaattgttgaacatgtttaataaaaagggtaatgattttataatattcgacttgcctagcttctacgagtagatgccatcacgactcccgagggtgaaaaatccgggtcgtgacaggatctcgtctattgctcgtttcggctaccaaatactcaattttttcatatttcaaaaaaaattaaatctaggtgtcacgacccaattcccgaacccggtcgtgatgacgcctctcttgaagacaaggccagctaaaccaaaacagaatacctcttttaaacagttaaatatcattaatcgttctaaagcatgatataatatccataatttgcgaaattaacgataacaacagtaaaagccatcccgacatagcccaaattggggtgtcacaagtcatgtgcaactaagagaaaatcgtgatacagtctactaatcactaaactcgatacaatagttctaagaacatgaaaatgataagataagggaggcacgggggctgcggacgccaacagctacctcgtgatctccgaaacactgcctggacgggaagatcagcactcaggagcggactttgcgatgcctgaatctgcacacacagtgcaagcagtaatgtgggtactccgacctagtgagtaataatcataaataatggctgaaagcaagaaaacacataaaggcacaaagcaattctatatcaagtagtaaaatcacttaaagcaatagatcggtgaagaagtcaaatggaatccctttaaaccaagtaaaacaggtaatttagcaggtaattaacaagtagaaatccacccctcgggcacagtatcaatcactcaaaacggtatcagctcctcgggatcactcttatcacttagtgctcattctaagctcttgacccatatatctctcataataatagaaatcagaataaccgctgcggcatgcatcttgattcgtacatcgttgtggcatgcagcccgatccttatagatagtcgactgcgctcactgggggtgtacagactccggaggggctcctacagcccaagagctatattgctgcagcgtgcagcccaatccatataagtgttgcttcggcgtgcagcctgatccataacatatataatatcctcaccattgggttctcaacccctctctgtcatttacctcacagcctctcgggcacaataatagaagatacggatctcagcccacaaattcctctcatttaggaatagtatgataaaattcgactcgaatcgtttaaaacagatagaaacatgaccgaggatatgatttttaacaagtatagtgaggaaaaatcagtcaaaatccccgaagggttcagatagttcgcacgaagcccaaatatgacaattagcccaaataatgatgataacaaataagtttcagtcaaatatgcggtaaaatcatcagtcgggacggaccaagtctcaatccccagtagtaaaagaccccacgctcatcatccagcgcgtgtctcacctcaatatagcactacggtgtgcaattcggggtttcaaacccacaggacatcatttacaatcattactcacctcgaaccggctaaatctctagctcgcgacgcctttgcatctcaaatcggcctccacgtgcgtcgaatctatccacaatcagaatgaatacatcacaatatgctaagggaacaaagcccaagcgaaaacaatcaataacaggcacaaatcccgaaattgccaaaacccgagccccggacccacttctcgaaactcagaatttttcacatcattagatgtcttatctccccacgagttcatatataccaaaagttctcaaatccgaccccaaatggtttttcaaatcccaaataaatgtccaatttctcaagccctagtacttcaatttttaggtttagtttccatgaatttctaggtggatttcacaatataatcgagttttaagaccaagattcttacctcaagtcgattcctcttgaatccctctttaatttccttcaaaaatcaccaaaaacgagcagccataggtgaaaatagacccaaaatcgcggacaagacaacttaaaaccattctgcctaggcctgactttccttcttcgcgaacgcggtcaacatctcgcgaacgcaaagcacaaaattgcgttgaccagctttaccttacgcgaacgcgacatgccaattgcgaacgcaatgcttccatggccttgaccttcgtgaacgcattcgctccttcgcgaacgcgatgaataactgaccattagaccaaatcctccttcgcgatcgtgtatacacactcgcgaatgcgatgaagtcccctaacaagccttcgcgaacgtggcatggaccctggagaatgcgaagcttacgaaacccggcccttcgcgaacgcgaaggccaaaatacctgcaactgctggaacaagatctgcaattttccaaactctaaaatggtccaattgaccacccgaaactcacccgaggcccccagaacctcaaccaaaggaaccaacacatcctaaaacctcattcaaacttgttccaatcatcaaaacacctcaaacaacaacaaatcactcataacatatcggattcaagcctaagttttctaaaaacttccgaaatacgctttcgatcaaaaatccaaccaaaccacatctgaatgatctgagatttttcacacacatcctaaatgacataacgaagccactgcaactctcggaattccatttcacctcctggattaaaatctcacctaccaaccggaaatcgccaaaatctcaacttcgccaattcaagcctaattctactccaggcctccaaagccaattccgatcatgctcctaagtcataaatcacccaaggaagctaaccaaatcataaaaattccgatccgagctcatatacaaataagtcaactcttggtcaaacctttcaaattcgaagctttcatctgagactgttctttcaaattccttccgattttcctgaaaaccaaaaccaacgatctacatcattcataatacattacacggggaaagtcatgcccgagaactggcgatcaagtgaaaaagctcaaaacgactggtcgggtcgttacatcctcccccacttaaacacacgttcatcctcgaacgtacctagagttgttctagaagccaatcaataactgaataactttaccatgcatatacccgggggattatcccacgtcaccctatctcatataggtccgataacatattgaaactaaaattacgcaatccagtctggcccctaagccatagaaccacatttccacttctgaaaccatcaatacgatcaaagcctcacacctatactctgaatagactcgaaccagctgtaataacccatgcctgcaacctcgggagcaatcccatgatataccacataactcaaacactcgtagcgataacttctattcacagcagttgtccacaacaaccgaatactggtagaaaatctcttaccagccaaagtctcattccaaaactatcaaatactgccaacgataaatgaaatacgcaataaaccataaccattttcttagatcacccattcatgaagcaacttctcctctgacaaataccatagcaaatttccgagccgaacctcgatattaaccttccaacatgctgaaatcgaatccgttcgtattcattgatgatcccaacgatctcctctaatccaacacaccactctggtgacatgacacatcaatagaggcctaagccacaactcaagctcactagtaccaccacaacacaaggctgagaacctgtctcacatcatataatagaacatatgaatctagcccgcaagttcatatcccatatagcttcattgcaatgtgcgatcctatcaaacactgctccacatgagacacctcaagtcactatgctcgaaattgacaaccacgcacaatttgatgtctggaaccaaagcagatcattacacccacggtgaaacaagtaacatataccacgcaaacccgataggacataaccaatacgccgttcaccgagcaacatctaattactcttcccgctcgacttccactatgaaccccaatggaaccgcaccatgtgtgctcataaccaacaaatcataacgtcttgcaacacataaaggcaacccatagatcttcccagatcactaataaactcaataatagttgaatcaacctatccctcaacaatacaattaggggccaaccaagccgactcaagatagaacacgtatccatattggcctgctaacgaactccttaccaaggaagcttaaagctgccccttacactactataactcccgctgaagccatacgatacggtgcccgacaccaaattaataccaaaatctgcaacctcgcccggtgacatgcccggccataagaaacacatccgaaaagttcctcaacactggaactgaatcaatggtagaaacctctgctttgacattcatcacgaaggcccaattaagaaaggcaatccttcctagacgtccgctgggtccttgaaatataaaccactatactagaacataatccgatgcacctcgccacttaacccgtggcatttccggcatagccaaaagcgcaatagttcggaataacccaacatggagacaaccagtctaaaccccaacatcacatccaaaatctaatataccaagcaaataaagatccactggggcctccaaatcccggtagttgctaaacaatgccgatacacacaatctacaaccacaacatagcctgaatatgagaactttcgtctccacatccaaacgacacatgaatcaccatatccgatcccaattttgccatccgaacacatgccacacctttaatacccaatcattccatgatagatactctaaaattcttttgtgcttccaagcaaactcgaatatcagcagccgatctgacaagaagtgctgcaatactaccggagtaccatcaacttaatcacattgcctctgtctgaatatatactctcgtccaatcacctcaattaacattaccctttctttaatcatctaaagatcatttctcaaatcatctgaaggtcatttcttcaatttatctaaactgcccatactacataagaatttatgacctttctttcaaatttgaaccgtgaccttacacatgccaatctcactcctatacaacataccgcataaaccgtaccattctaggataacaacaagaaccttgtatctcttccgagccacaagaaactatgtactcaaccaaccaagaacttcgattgttcccatctagaagaaaatcactatacataccatgctcctcatgcccatagaaaatatatatttccaaccgaggtcgaaaccatcaagaactctccgagttccccttgcacaaaccagacctgccaggactaaatccttctaactcaaccgagctatgcagatcactaaaacccaagagaattgccgagaaacacatgtagaaactcattatctcgcaagcatccgaagaactaatcatatccttaccataccaactcggcctactaccaagctatcccgtatattcgaatttccttctgatttaccttcaacttgatactcattcttgctataacatcacaattcctcaaaccagacttaccacacgggacccaagcataaagccataccgtctaaggctcataagccgctgaatactttctcagatattcccacgagcaccactatcaaagtactttgctctgaagagacttcctgcgaatctaaatctgttacctttaccttcccggtactgatacatagaatttcataatttataaagataataccacaagtctcgacatcttctaatgaaaactcaggttctaaccacatatacaactttaaaatacccaattgttatatgtaaaatcttgaacacattagaaccattctcgagagtcattcactctattcaaactgcaattagcctgatcaaatgaacagaagcacctgtgcttcaatagcactccgacaccgcagggtgtaatctcatcctagaacaaccaagccacttcctgctctatgcaccgagcatccattaccacaacagctcaagacactctaagattcccatacatctatgaagcatgacataacctctgtcaaaatttttcctttactcaagacatccacgatctcaatctccgtaatccatgactgattcaccagtgcacctcaaactggaaccaacatagcacataactgtgcaatcaacaaatcaatagcagactcccccacttggctcgaagccatagatcaaaacacatttaatatctcgtaacacatatactctattaatgccataataccatagtgagattaaactcaaagccattgtaagcttgcgaaaacacagatcatctagtactttaactcttccgcaaatctcgcattcactctcacaatagttaggtcccctctcttaagcgacccatttaaattacaagacatatctttcacttgcaaatgagatcttctaacagacagcataaagatcgcacaacttccgaactcttcgtaggagataacccacctgatttgcctcaaactaacattcccgcataccttccaccgtcgtaaactttacgcagtcacttagtcttcctgagtctgaactcataccgcaacatgaaatttacttcacttccaactaggaaaaatgaaaagattcttcacacgccaacaactcgggctatacctcaaaccgagatggaattcaaacactaatagttcttctatcctccagcggacctttcttgtcgcttctaaatcatatagatacgtctcgcaatactaacacactcatcacatagccatccagtcgtcgctcccactaacagggacagtaccaaacatataagttcaaaaacacttgctcacataatcagcacctcggtgctcaagccatagggaaagatctggcctcaagtcctccagactggctcaacatcaactcacagagatcacatctcgccccccgatctaggactcataagccatcattgcaaatctgatactgagcgctcatgcgtgcatacgaatgcgtggaaggaattcaaagagttacagttcaagctgaatcaaggacgcacgataaggattcaagaacatgaagttttcctaaaggttctgcaacctctcgaggataaatacaaacgtctccataccgatccatgagactctactaaacctgctcatgactcgtgagacctatgtaacctagactctgataccaacttgtcacgacccaattcccgaactcgctcgtgatggtgcctctcttgaagacaaggccagccagaccaaaacagaacacctcttttaaacagttaaatatcattaatagttctaaagcatgatataatatccataatttgcgaaattaacgataacaacagtaaaagccatcccgacatagcccaaactggggtgtcacaaatcatgtgcaactaagagaaaatcctgatacagtctactaatcactaaacccgatacaatagttctaagaacatgaaaatgataagataagggaggcacgggggctgcggacgccaacagctacctcgtgatctccgaaacactgcctggacgggaagatcagcactcaggagcggactctgcgatgcctgaatctgcacacacggtgcaggaagtaatgtgagtactctgacccagtgagtaataatcataaatagtggctgaaagtaagaaaacacgtaaaggcacaaagcagttctatatcaagcagtaaaatcacttaaagcaatagatcggtgaagaagtcaaatggaatccctttaaaccaagtaaaacaggtaatttagcaggtaattaacaattagaaatccgcccctcgggcttagtatcaatcactcaaaatggtatccgctcctcgggctcactctcatcacttagtgctcattctcatctctcgacccatatatctctcgtaataaaagaaatcagaataaccgttgcggcgtgcagcccgatccgtacatcgctgcggcgtgcaacccgatctttatagatagtcgactgcgctcactaggggtgtgcaaactccgaagggtctcctacagctcaaacgctatattgttgcggtgtgcagcccgatccatataagtattgttgcggcgtgcagcccgatccatataagtattgctgcggcgtgcagcccgatccataacaaatataatatcctcaccattaggttctcaacacctctcagtcatttacctcacaatctctcgggcacaataatagaatatagggatctcagcccacaaattcctctcatttaggaatagtatgataaaaaatggcttgaatcgtttaaaacagatagaaacatgacagaggatatgtttttaacaagtatagtgaggaaaaattagtcaaaatccccgaagggttcaaatagttggcacgaagcccaaatatggcaattagcccaaatcatgatgataacaaataagtttcagtcaaatatgtgttaaaatcatcagtcgggacggaccaagtctcaatccccaatagtaaaagatctgacgctcatcatccagcgcgtgactcacctcaatatagcactacgatgtgcaatccgaggtttcaaaccctcaggacatcatttacaatcattactcacctcaaaccggcgaaatctctagctcgcgacgcctttgcccctcaaatcagcctccactcgcgtcgaatctatccacaatcagaacaaatacatcacaatatgctaagggaacaaagcccaagcgaaaacaatcaataacgggcacaaatcccgaaattgccaaaacccgagccccggaaccacttctcgaaactcagaatttttcacatcattagatgccttatctccccacgagttcatacataccaaaagttctcaaatccgacaccaaatggtctttcaaatcccaaatcaaaagtctaatttctcaagccctagttcttcaatttttaggttagtttccatgaatttctaggtggatttcacaatataatcgagctttaaaaccaaaattcttaccacaagtcgattcctcttgaatccctctttaatttccttcaaaatctcctaaaacgagtagccatgggtgaaaatagaaccaaagtcgcggacaagacgacttaaaaacattctgcccaggcctgactttccttcttcgcaaacgcggtcaacatctcatgaacgcgtagcacaaaattgcgttgaccaacttttaccttacacgaacgcaacatgcccgtcacgaatgcaatgcttccatggccttgaccttcgcgaacgtgatgaataactgaccattagaccaaatcatgcttcgcgatcgtgtatactcactcgcgaacgcaatgaagtcccctcacaagcctttgcgaacgcggcatggaccctcaagaacgcaaaacttatgagacccgtcccttcacgaacgcgagatccacttcgcgaacgtgaaggccaagatacctgcaactgctggaacaaaatctgcaattttccaaactccaaaatggtccgattgaccacctgaaactcacccgaggcctccgggacctcaaccaaaggtacaacacatcctaaaacctcattccaacttgttccaatcatcaaaacacctcaaacaataacaaatcactcaacacacatcggattcaagcctaagttttctaaaaactttcgaaatacgctttcgatcaaaaacccaaccaaaccacatccgaatgacctaagattttgcacacacatccaaatgacataacgaagccacttcaactctcggaatttcattccgactcccggatcaaaatttcacctaccaaccgaaaatcgccaaactctcaacttcgccaattcaagcctaattttactccgggcctccaaaacaaattccgatcacgctcctaagtcataaatcacccaacgaagctaaccaaatcataaaaattccgatcctagctcatatacaaataagttaactcttggtcaaacctttcaaattcgaagctttcatctgagactgttctttcaaattccttccaattttcctgaaaaccaaaaccaacgatatacatcagtcataatacattacacgaggcaagtcatgcccgagaactagcgatcaagtgcaaaaactcaaaacgatcagtcgggtcattacacgaggtattctgacttactttttgataaaactcatgtatataaaattcttatttgttgttttttaccgtggtctatattttttgtgatcattttgtgatttaattaatttgttatttttttatcccgattaaaatatttatgtgctaaaaaagtagtaaaaaggtatattattttatgaataaatattgttatatgtgattttatttttgtacgtatattaatatgtgactttattgttgtttagtgccttttagtgttatgttgtgttcttaattgttatgtagtgccctttagcatagtaaaactgatgataaattttagcttatggtaattgactttgtttatggccatttagagtagtgttattgtagtactctttaagattatttagtgtagaataaaaaattatgtgctctccttaacaaactcgggtagagtacttaattatatatttaatgtatcagtatataattatcaaatattagataggaatcataaaattatcatttgccgagaactggcaaaatatgaagttaacaaacaaatcgttgagaatggaataaattcaatattatttactattaagtttgtggtattttttatatgattaattattgagtatatcttgattacttatgaaattgtaatatattataattctattataattcaaaattaactttaaaaagatgatagttcaaacaaaaccatgtagaattttagtacaaaaatgttggaaactaacatatgaaatattaatacataaaatttatcaacctaagtatttgttaaatgaatagttattaaattatatttatagttattgaaattaatcatttaattatttgttaaccccaaaaatatacgaaaaaagattaaaaacaacatataaaatatagagaatttgtcaaactaagtattttctatatgaatacttattaattataacacgtatatttatgaaaattaattatctaattctattacatccaaaaatagctgagtaagaaaaaaaaatataaaataacaaattaacatataaagtaatgtaataaactaacatataaaatagtaatatataaaatgtatcaacctaagtaataatagagaaacaatatcgattaaatattaatataaaagatattgaaatatatttaaagatgttaaacaattaaacagaaaatactttaattaatattgttcaatttacggacatcgtcatggaggttccccctgtgcatcctggacttgcatctcgagagctactcttgctacagggcaaccataggtctttacacatctgagatggacagtgtctgccccggatattccgccccagacgtatagacgatatgtgggagttcactagggaccacccactgcatccccttatagttagacacctccagaatacgggtttctacaagatcatagagatcggccggttgcagttcgactgggctttaatgggttcatcataccattctttaaaagcacattgatttttgtcctaccaatggggatgataacacaacactattaattaacatgttatataaaaactattaacaaacattttttcaaaaaataataacttactagttgttgatacgtctagcgtctgcgccctagattgtaatttgaccaacatggcttcaaaattgcatgttttccacagtaacacattggtatgccattgcgtccagacatgatgtaatgctcgaaaaataaaaaattaatggaaagttgttctattcgttttgttacaatacaaataataactaaaatgtgcgaggtttttataggcagctaagagtgattttaggttacataacacatattggtgatgtgctatgttacccgtgctaatgtttctttagggtacaagtgggtgcagctttttagatcgacaactttttcagctccacaattttttcaggccgatatgacaatacacataatgcatattggtgacgctctatgttacccgtgataatgattctttagggtacaagactgctttttcaggtcgacagctttttcaggttaacatgacaatacacataacgcagattggtgacgcgctatgttacgcatgataatgattctttagggtacaactgggtgcagcttttcagatcgagagcttttccaggtcgataacttttttaggtcgacatgacaatacagataatgcatatcggtgacgcgctatgttacacgtgatatgattctgtagggtacaaatagatgcagctttttcaggtcgatagctttttcaggacgacatgaaaatacacataacgcatattggtgacgtgatacgtttaatatacaagttcatgcagtttagttcttcttaagttgaaccaagaaatcagtattcaaagactatttgaagaatcattgcaacattcatttaaaaaatgctactaacatttaataagtggttcaagaagaggtaaaaaggtaaaggtagttcatcaaatccacatggaacacgtcataatacaataaattcctacctgaaaaacatatgctaggttgttatactggtttggttgatgacaagtggtatggtattctacgtcccttggaaaataagcctatcaatatacacagtgatctcaaagttgcagggcacattattgagggcaaaacgcattctatagagcctgaaggtatgcgaatttagggagaaaaactacaataagttcccctttactcaaaacggtgtaattatggagtactatgtcactggcatggtctaggtgcaccacaagcactgtctgcaaccttccaaacaaacacacacaaagatgaactagaagtgattcggcctttgatgtagagattttagagatgaaaaaggcactagccgttcatcatgcactggatgaacttaactacctggaaggaatggaggatcaatgttggaatttattagaaaataaaaaattacgtagagacaataattatcctatttacccaatagctgtcgagtgggagggactacctaagtttctaccacagacgttggatgtaagagtcccatattattgtagaaatcaagcaagtggttttactaatgatatcgatgaaatacgagaaatgtgtgtcaaatagggcctatattatgatgccctcgatccgaagggtgcatacaagatgttgacgaagaagatgaagacaatgataatgaaatagtgccagatagtgacgataatggcgaataaaaattgttatttatttcttgtggtatatgttaaattgttgggttgaatctttaatgctaaatatcaattagatttaatcctattggaaacataattatattttagaaattttgcaaactgaacatttacagacatttagtacaacaaaaatactgcaataaaacactacatttatccttgataattgggaacattagatgaactgccacctggagctgaattaccaccattttccaaactagctgaaggacatttacggcggtcgtatcctgtttgggaacatataccacatttacgcatataaaagggtatcaccaacatccatttggttctgtatgcacgttcttttttgcacttaccgttgacgcacataatccttattacacaccattttaaatgattccggtggccaataatgctcagtacccactagctgcaactgtccactatatatgtttaagtatgcaacaacattatattctttatcaatgtacctcgttgctgcgaaacctgtatgttgaaagtacttcatggtatgtgagcatgaaaagtgatagattgaccattttccataggagcaaaatcttttggatttattgacaacatgtatattattctcgcggttgtcatgcagaccaatgcgaacttcaaaaatatttagcttgctgcaatactacaaaaattcatgccaccgtactcgcttcttatatttctcaaatcgtttcattgattgtggtataagttcaacacccctttccatcaatgacgatgcacctctagatctttcaacaaacctctctgccatctacttgaatgacatacgcaccatggcagtgacatgcaatccacgtgcaaacttcaataacctgttgaaagactctgatatagttgtagtcaaaatttcgtcaaaatttcccatcttctactaccattcatatgcaaagtccactagtcaagctcatgtcgcatcaaccaacgataggcttctaggtcttcctatctaatcaattccttttcctcctgaagttacactcttggtgatctgttacagccatttaaatcatgtaattccttgtttggataagccccctagaagttggccttcaagtaccttacatagtaacagtggtaggaatacggttcctgtcatacacgcaaattttgtacagaacttaaaataccgccatgccgatcagatattagacaaatacctgaacattgtttgacaacgtgctccttcaagtggttcaacaataatgtccatgtctcttggctttcattggaacaaatagcaaatgctaggggaaatatacttccattagcatctactgcaacgacgatcaacaacttaatatcctactttccatagacatgagtgccgtctatggatattaccagcccacaatgcacaaaaccatcaatgactggtttaaatgcccagaatacatatctgagtatgtattctagtattttcggactccgctcaagcttccattcaaccacagtcctgaggttaagtgttgcaatgcagccatgtacttgggtagagcagaaaaggacttatcccaattaccataaacaatttcaaacgcacgtttatgctcgagaaatgcttttttgaggtgatggtacatctatattcctggtggacagattgtcacgaccccaaaccggactcggtcgtgatggtgcctctcataaagacaaggctagctgacacaattcccaaatcaaccattttccatttaaaagtggtttttataccatctataaaccattaatgtcataatgaacattgaaaagaaaaatacggaataattacacaagctcgacatcgggtgtcactagtcatgagcatctaccaaggtctgaatacaacaaaaacagtcaagtgtactaagtacagaaatggaaatgagctgaagaagtagtgttgcgaacgtcgtgcggccaccttgctaactctgatgactccgcgtctgagcaatcaatacccgctaccgggttctgaaatacctgaatctgcacacgaggtgcagagagtaatatgagtactccaacccagtaagtaataagagtaaataaagactgagcagtaggaatcaatgaatccacattcatgataactcaataagcacgtaggttgctaattcagaatacgagtcgatcgtcttatttaaaatctagccttttggtaaaaattatttaaacaggtgaaaatactttttgacagtttcagtaggcgttcaataccatttataataaaagagatgaaaaccataatcggcccctcaggcaaaacatagttcataaactgcccctcgggcaaaaaaataaacaggaatcataaactcttcataacatgaaaatctcagtggaaataacaaagccaaatcagtgattaaattctgaacatctcacaaaccccagcttaaatgaaagttgttttaaaacatttgttcaacactttcgatagaggctcaatataaagatgagtgaaaacagtcaataatcaacatattcgatagaaactcatttttaaagaggagtgaaaaaaaataaataagttcataaagaggccccttatgcaaagcatcactcatatgcatgtatatatctatcgcccctcgggcaagcctctcagtcactcacgactcaactcttactaatcagcgctcacacttagcactcacactcaataggtaccatatagtaaccgctacggcgcgcagcccgatccatatgtcgctgcggcgtgcagcccgatccatatatatatatatatatatatatatatatatatatatatatatatatatatatatatatatatatatatatatatatatatttgcggcgtgcagcccgatccatagatatataatctctaggcccccggcctctcttagtcattagcctcaccattagactctcagtctatctcagtcatcaatctcacaatcagaccctcagtctatctcagtcattatctcatgatcactcggatcatcagtaaaacaggaaaatagtttccacatttttaagaatatagtgataaagccagatttgagcagtaaacaggtaaaacataattgaggatatgctttcaaataaataaagggaggaaagatagtaaaaatacccttaagggtctcaacaagtcggcacaaggccccaaacatggcatacaacctaaagtacaataacatcaaatggttaactatcaaatacgcattaaaatagtcgttcgggatggactaggtcacaatccccagtggtggtctaccccacgcttgtcatgtagcatgtaagtcacctcaaagtaacacaacgatgtgtaatccggggtttcaaaccctcaggacagtatttacaatcattacttacctcgaaccggctaaatctctagctcgcgatgcctttgcccctcaaatcagcctccacgcatcgaatttatccaaaatcagaacgaatacgtcacaatatgcaaaggaaacaaagcccaagcgaaaacaattgaaaaataccaaaaattccgaaattagcaaaaactcgagccctgggcccacttctcgaaactcagaaattttcacatcattagattccttatcaccccacgaattcatacatatcaaaagtcctcaaatccgacctcaaatggcccctcaaatcccaattcaaaagttcaaaatctcaagccctagttcttccatttttaacttaagttccatgattttctaggtagatttcacaatagaatcacgttgtaggttcaaaaatcttacctccaatcgattatccttgaatctctctttaatctccctcaaaaagatctcaaaatgatcaactatggaggaaaaatgacccaaaattgctgatgaaataacttaaaaactttctgccccgcactgctcgttccttcatcgcgatcacggcacaagcatcgcgatcgcgaagagcaaatcttcaagacctcagcagtacactacacgaacgcaacaaataccatgtgaacgcgatgcttcagcttaccatacctatgcaagcacgagccctctagtgcgaatgcgaagagaaattcctcttggaccccatttcttatacgcgaacgcggacagcctcatgcaaacgcgaagcaccagctcccagccttccatgaacgcgaggccacctatgcgaacgcgaaggtctaaattctggccttccaaattccttctacgtgatcgcgatataccccatgcgatcgcgaaggcttaaatgtctacaacacctgaacaatttttctacaacattccaactccaaaaatagcccgattgaccagctgaaactcaccctaggcccccgggacctcaaccaaaagtacaaacacatcctaaaaccttgttcaaacttgttccaatcatcaaaatacctcgaacaacaacaaatccaccaattcacatcgaattcaagcctaaatttctaaaaacttccgaaatacgcttttgatcaaaaacccaaccaaaccacgtccaagtgacctgatattttgcacacacatcccaaatgacataacgaagctacagcaactcggaattccattctaacctctatatcaaaatctcacctatctaccggaaaacgccgaaatctcactttcgccaattcatgcctaaaccttccagggacttccaaaatgtattccgatcatgatcctaagtcccaaatcacctaatggagctaaccaaatcataaaaattctgatccgagatcatatataagcaagtcaaatattggtcaaacctttcgagtttcaagcttcaaactggaaactgttcttccaaattcattcagattttcctgaaaaccaaaaccaacgatttaaataagtcataatacatcacacggggctagtcatgcccaagaactggtgagcaaagtgcaaaagctcaaaacgactggtcgggtcattacacagatgttataaactctttgatcttgtaccttatggatgcttcaatgtatgtaatcaagacaagagaaatcaagccaacattaaagttaaaatgattcctactaaatgtgtccatttcacaagtgtgggtgccaatgtgtttccccacaatccacatatttgttttcaactttctcgcacgcagcatccaattacaaccttgaaaccatctatgacaaataaccttgtatacgtccgtagatgactcatgaaccacgatatcataacactcttttatgttgtactttcgcaccgctctgcttaggcacgctttatcagcaaaaaatatattctttgatagcaccgttactctagattcatcccccattgttgtccaaattttgtcaagatcccttgtgagggtatccatatccggcatacttggaaaataatcaaggtagaaaatctcccttgaatgaaacgacacatgggactcgtacactcttggtctaacgggaggtggagcatgctccctcgtcaaatttggttcatcattctcgtcctcatcatcatcaccctcatcagggaagggtgtgtcatctctaaactcatcaacattgttgtcataatcactatcatcttcccgactctgcgcatctgccagatcccaattaaatatgtcgtctccgggtaattaagtaaggacatgaccttcaagttgctcgttttcacttcacaaccaataaaataatgagtttctcaaattcatccaaacattacatataaactgtatcacttaacttacaaatcataatatgttgatatcccatgatgcacattatcctgttgctgatgactcctggatggaccaccatgatccaacataccaaaactaggcatattccaactgtccgttggttcataacttgtaaaattcatatctagtcggtaccccctgtggaatatatcagtgttaatacaaacataatacataaaaataaacatcgtaacacaaagaaaaattgaagtttactactcggtttgtggattatgtaaacttggggaaaaattatatcctcgctcctcattcacccgtgaaaataagtttagatctggctaaactctttcacttgaaacctgttcggataaaattgctccaattaagccacttgataattgcgagatatcattattttacggaccctcaatgttgcgaacgtcttcagccttggcatacatttccaatatttttatcacaagaagttttcggttcatccgaagtcctcataaaatctatcagagcttcatcctattcgatgtttaactcagcataccaagtaaccccttgcggagtaatagattacggatatcttcctgttactttaatattaaccgaacgtttgtgcacactcatttttttacataacaacgatactagtctatcgtacttcattgtaagtggcaacttaatatgacactgtagataacaactatagcatactgagttattctctaccacaatctcaaccccccccccccccccaatataataaaagcctaatttttctcacttcggacattatgacaaatattttggaatacctgaaggatcctaaatgaatttttaccaaattctgaaactccttaaataagaaaaaataccagtccgggggtacaataattgaggtatagcgcatgtataataggcgctatatatgtagcgtgtatattgcatgcgctataccctcaattattagtgggtcaacacggttcagataaaatattggtggggcaggaaagttcaaatatagcgcggctattcaccgcgctataccttaatggacaaacgtgtcgttaaggtatagtgtggtgaatcaccgccctatatataccacgctatatataaaatggtagtcagttatttttttcacctattattgttgtttgagtccaaaaaggtattgttgtttgagtccaaaaaggccacaatttggttccagactctaatatttaaatcttttctaatagtacaagggtatatttgacatttctttccgatttaattaaattactcagctagccagtgtgtaagagaagtttatttaaactaattaatgcatgatggttatgtccatcaattgaaatcaacaatggaaaagattgtagaaaacatgtgattttactgatcgatgttaggaataaaaacttgtaaaaccaatgttgggagttgtgatgacccaagagatcatcacttgttttaaaatgaaatttctgtgttctgaggatttaaaaacctcttttagcatcacctcgatttgcatgcacagtccgggtgcgtagtcggaaagcttatatgtgaaaatctgtgaaaaatgataaattttgactataaatgaattattttgacttcggtcaacgttttgggtaaacgaacccggaccggtgatttgacggtcccggaggatccgtaggaaagtatgggacttgggcgtatgcccataatcgaattccgaggttccaagcccgagaattgaatttttgaagaaaattattttctgaaattttttaaaggatttggaaatgaattttgattagaacgtgttggtatcgggtccgtattttggttccggttcctggtaaaggtcttatacgttatttaagataattctgtgaagtttggtaagaaacggatgtcatttgacgtgatttggaccttaaatgcaaatttgattttttaagaagtattgaaatattttattgattttgaagtttaattcgatgttgatgatgttattttggcgatttgatcgcacggataagttcatatggtgttttggagttagtaagtatgtttggtttggagcccctagggctcgggtgagtttcggatgtgtttcagaaggttttaaactcttaaaaagtcgcaggttttcagttgctcgtattctggtattttcttctttgcgttcgcggaggactctcgcgaaggcgatgagttaattgtgctgaaggaaaattccttctatgtgaacgcgagaccgaggtcgcgaacgcaaagctttggggggtctacccttcgcgaatgcgggcctggtatcgcgaacgcgaaggcttgtggcttggttaggggaaagggaaaattatacctatgcgaacgcgactacttggacgcaaacgtgaaggctcaaggagttacttctccgcaaacacgagccatcttctgcgaacgtgaaggtctgtcatacctaaccatcgcgaacgcgatgaccaaatccgcccagttattttaaaagtccagaaatagaatgcattacaagatttaacccatttttcacaaacttcttcttctccacacctcttgggagatttttggaagaacttcttcaccataacctcatgggtaagtaatctttgacttgttttcttccatttttatcaacatctactagatttctaggcctaaagcatgagattaagggtagaaaattagggatttgggtagagttagggttttttgattatttgggaatttgacctcgttttggggtcggattaaaaaacaaattatatattcggtttcgtgggtgaatgggtgatcgagttttggtccgaacctcatattttgaccaagcaggcccggggtaaatttttgactttttgggaagaatgattagaaagccataattaagcattggaattggattgtttaggatttattgatgttattaagtcaattatgtctagatacaattgttttggagccgaattcaaaaggaaaagcggtgtttgaggcttgagttgacttttgaagtttgaggtaagtgttcagtctaaccttagcttgagggattaggagttgtgtcttatttgctatttgtttcttattgagtacgacgtataggcatggtgacgagtatctatatgttggtgtcaagcatgaccgtgggtcttatattgtgattttcatgacttcgttgtgttattcatgccttggtgaaggtttctattattgtgtaaagtttgtggaaagaattgtgacctatgaacattgagtagcgttgtctcaagttgtataacgaattgtgaaagtataagtgataattgaacctccagagcactgactcgagttgtgaagtgaattgtgaagtaaaagtgagaaagagaagagatcattatgttgcccccttgccgggctattgttgagttgtggtttccttgcattgtgttcttaattgacattacgaatgcttaggttgatgattctttgcgttgggtaaggattatggttattctcggggaacaagtttggttatagctgaggtagttagatgttgtaacaagtttggttatagctgaggtagttaaatgttgtaacaagtttgattatagctggggtagttagatgttgtaacgagtttggttatagttgtttctcccttgccgggacgtaattgcttatgctgtcggatcccttgccgggatagtgtagaccttgttgatcccttgtcggaactctcgttataattaaaatattttatgtggatcaggttgcacgccgcaacaatgataaatgatatggatcgggttgcatgccgcaacaaaattatatgtggatcgggttgcatgccgcaacaatgatatatgtgtatcgggttgcacgctgcaacaatgataaatgatatggatcgggttgcacgccgcaacaatattatatgtggatcgggttgcacgccacaacaataatatatgtggatcgagttgcacgccgcaacaatgataaatggtatggatcgggttgcacgccgcaacaaagatatatgtgtatcgggttgcacgccgcaacaatgataaatgatatggatcgggttgcatgccgcaacagtgttgttatatattgggatcgggttgcgcgctgcaataattattgatacaagtgtgtttagcgtggatattagtttcttttgttttgctgtgaattttaagctgcccttagactgttacttttgatttactgttaatactggtatacccccgtagcatgtatcccctcccatccttacttgtttatttctgttttattttccaatgtacattatataatacacaggtttatttggtagtctggtcctagcctcatcactacttcgccgaggttaggctaggcacttaccagcacatatggtcggttgtgctgatactacattctgcactcttttgtgcagaccccagtgttgtagacttcagaccgcggtggaattgctgattcttgttcatcaggcgacccaaggtagtcttataggcgtccgcaggccttggcgtctccttccatctactattcctgtttctttcatgcatttccagagacggtattgtatttatttctttcagacctttatttgtagtgttcttagaccgtctgtgaaactatgacacccgttctgggtagtcgagattcaaacagttgtattggattcatgttctgatagcttattgctttttcttccgcttatgttaaattccgctgtttaaatgttattacttcgaaattgttaatgaatataaaatgggtaaaaaggtaaattgtgcaaataattcgcttgcctagctcgtattagtaggcgccatcacgactcccgagggtgggaaatccggatcgtaacaggagttgacctcatgttctccctttcttaattctgagctacgattcattgatatcaactaacaacaaaagattctgaaaattaagttcacacttcaaattttgcggacatacgttatgaataaattaataaagtccacgttcagtgtaccctttttcgtcggagctaggttctattcctgaaatcaataagaaattgatgaaactcacatgcatgattttgccaatgtaatgactaaaacgaacttctgcatccactgtaggaactggatttccacgctctctctcttagatcaatgaaccggccaggcaagagtttcagatatcacatcagggcttcaactttggagttgacaagttgttatgagaaaaatttgcaaatgcattgtcggattctgtgctctctcttgcttctgggtcgcaattgttaaacgaggccacattatattggtccctttaaacacgcggtcattcaattcagacgaaccgaatctgaacaaagaaaaagtatattattactttaaatatatttgtttttattgttatttaaattattgtatcgtattgttaaatttgtcgttacgtaacaacgtaacgtacaattttatgtaacgaccgatttggtgtgacattgttaccttatttttttaatcatattgcccttccttattaatcatttatcatatctttttatatactaataatttattttctattaactttttctttgtaatattgcaagtttattctttatattattggtatatgacatcatgaaaacaacgacaaacgatacaatttatccaaacattgtatcatcaaaacaatatataaaacaatacaatataatacgatacatgcattatgaaacaatttgaacaaccatataatacgttacatgcacgaaataatttgtaacaaccatccaaactagctgtaagggaatggaatctgaaaaaccaaaggaggaagaaaaagaagaatagtagaaagtagaaacaatcacacctaccttcctttgctgcttacaaattgccatttagacaagctcaaacctttttaaatagtggtagattagattttagtatcttgtagttatttccatctaaattcacccaaagtccaagataaatttctttagtgtttttcagttttagaatttaacatataaaatatattttatacataaaatttattcgattcgattcgttatttttcagttttttacaaagctaaaaaaaactatcataattctccgtgaggatataaatttatactgaaaccttattttactttaaaaacctgataatcaactccgttaggttcagtttggtcaaatggtcggttttcaaagttgttttgacacgggtagttgcaattccagtggcctcactactgatgatctcaaatccctaatctcacaagtgagtattactgaattaattatgtaaggaataatttcaaagatgtttcttcgtgtttccctctatcacattatctccctcatggttcataatattatgtttaccttcattattttaattattttgtaataattttctacctatttttcattaatataatatagtttgagaaactctcctttttctaatattaaattttttcaattaattatttctatcaaaatgtcatattttaaaaattcttttaaaataaaatcagaaaacgttcaaaattacacttttactattattgcgatgagtttgcatgccacatggcatccacctcaacgatacgacatgccacgtgaggtaatggtgccatggtggagggtccgaacaccagagggctatatttgcaccaattctattacatcgggggctataatggatcaatagtataacgaagggtataaatgaacattttcaaatagtaaaaggataattttgaaccttttctgaaataaaattgtttaccctaaaaacggataacaattaaatttatatgtggttttaaggatatgcgaattaattcaatacaaatgataaattgcgttagattaaacagatagaaggacgtaataaattgtcaactcacttaagaggaatgattccgagttcggttacagccttaatggaatgcctgccttcgatcccggattcaaaataacgaagcactgatgagcaaaagtaagaactttgaataatggacaaaatgagagtatattgccttggtatgcgtgttacaatgtgtttttaatgaataatcagagcccctttatatagttggggagttttatcctaagcacaattccataaaaggtaaaaatcttccaattaactaatcaccggttctttgccgatacgtgccgagattcacgccgtgatatctagctggtcgtgaatattacgacattttgttgatcgtgttcggttacctggtaatgctctccgaggcctttggggttcgaaccggacatggggtcatggccccgatactcacgagggtaggtgttttacccgaaccccggatcgaacagctccttgcctcgattccagttccttgccttcatgtctctcactctgtttacttcatcggaaattgaggcgtcccgtggttcagtttcatccatacacagatagtccactcgtttctcggagggtaagtttacgaaaacgatgagaaacgacatgagctcttcgattcattctccaatacgtcgtgacagaaacgacaaagaatttgaaatgccccgtcagttgcgtcataatgacttcaaacgcgtgtctgccatcggcaggctatccctggacgcgaaacggcgcaaagcctctataaatactccctccttcgttcattttttacttttgaccaagcttctaccttccaatcttcaagatatcactggctttcttcatactccaacatttttaccttcatttttcaagatttctcggtaaattgaaaacttttatttatgttctgtccaaaccagcatacttgattccttcatctcccaatattccttctcactctcccaaacttttttccatataacaatggtgaagacttctaaaatggctccccaaaaagtcacttcttcttctcaaccgaccaccaaaattgatgaaaccactcctgatgtggtcgacctggagaggtacgctgctgatgtggttaccgatgaaccggctatcgaacctcccttaaaaatgttcattcccgagggttgtttggtcgccgacgactttaaggttgagaatccctcttcggtgtagggtcagcatgaggaggcatcgagatatatatgctcgatcaccgaagatgtcctccttgaagtccgaaatgactgcaactgggcagataaggacatagtggtccccgaccctgaggaggccattactacccatatcgagggatatctaagtatttacacttatcccttcacactaggcccggtggacccgaccattatagacttctgttagaggtacaaagtatgtctcagtcaaatccacccatcgctgaggaggattgcaatcttcattcgattcatcgtgaacaagatcgactcctatcagctcacggttgatcatctactccgcttgtacagttcccgaatcttctgagggggctaataaagctcgtgcaccgaactaacaaagcatcattctcaagcatcgatgaggactggtattgaggctggcatgggagctttgctgggtaaggacctcagacttgatccctaccaaatttaggccattccccgagaggtggaatgcatcacgtaagcacgactttcctttaaatgttgatttatgttcatctcttttttcctcattggtatttgtggtggtacaattgttgctcgagtccccaacactatccctcggctcaagaagtggattgaggatatcatctcacagatgccttactccgagcgctcgtggcgcaaactctcgaagggccgttggtaggctcgttcccatggtaagatttatttcccaaataagttacattaggcttctccttctagcatcacgttctcattttcttgattcctctactttagggcagctcggggctgcatcaggagagaagaagaagaagaagaaaagaaaggctttgggttccccgagctcagagaagaaaaaaccgaagagaagattggcctataagccaaaggatagctccagctctcgagcaccagactcagacttgctctactggctcagggaagagcatgaggaggatgatctttttacggcctacgaaccgacctcccccaaagagcgggcgatagccgaggaggagacaacaaaggcctgtctttctcaggttcgggagaccgatgtagaaacgagggctcagccttctcgagacgctggctctgctccacccagcatcaaagaaatttctgggtcaccttctttcaccgaatctatgttggacaaagctcgagcggagaaggagagatataacgaaggggcctatggtgtggacgacccccttcgttgcctttttgaaggtgtggactcaaccgccctaaaagacttctccggttgggttatttggagctgccgagactatctttggaggtcagcgggctgaactcgagcccaaaattaaacaatcgattccctgccccgagcatggatctcgacaaaaagcagtcaataatcatcactgtcctggtagatgccttggttcttttcgcccccgttggagtagctagataccttcggtgcctagtaaccaataaagagtaggaaaagtgaatgaggtggacacaccgtgcttgttcaacaaagcatagcaggcgctgaaccaggtaatgcatcattaccctctttcatcttcgtattttagtctttgatatctatgatgccttttttttatatttttgcaggctttggtacttcatcataaaaattttctctggtaccagcctgaggttaaccagctcgaggctgaggtcaaggagcttgctgagaagagggacacatataagtttctcagcgagaaacataaggaagcggtcaagagtctttgaacaaagtcggacgcgggtcagaaggagcatgctgacctccgagtcagatgaacgaggccaagtccatggctgaaaggtggaaagaaaaaatggatcgattggcttcggagaaagagactgcccgggagcaactgacatcggtgtaggtccaactccgagtggcaaaagagaaggaaaatgcatgtgctcgacaaatcgatgacctccatgctcaactaggctcagctgctgctaaacgggatacctttaggaaggagctcgaatcagtgaagtctgtgtcagaaataactaggggtgatgctgaagagatggtggcccagtacagggccgatgtcgaggtagcccaggacctccttaaagttactattgagtacgtaagtggttgtcctgaagggagactctcgaggaggtccatgtccagggtttctacctgttagccgagattgaagatgcaaaaaggctcgaggccgaggccaagaagctggctgaccccaaggatggggagggctatgagggctccggtgaccccgaggatggagaagaccctgacaaccctactaacgaggtgggttctggtgaagatcgggcttaggcgccttaaggatttttctttgtttttgtattttgtctattttgttgaggccattatcgtcggcctttgtaaagacttttattggaatgtatataaggcgtttttccctttggtgattttcgagttcgtttcttttggcttcctctttatgattgcaaagatttcaaatgccttagcacggaataaaatgtagtactaaggccttgttcggaggttcaaacaagaaaagacttgttctcaatgtaatttttgtttgaaactcgtgggggctcgatatgactggaagctttacccaaagtgcttatttagatgtttttaaattatagttttaccgagggtagcctttgaaacagtttggaatttttgaaggccttatgttttgattacgggttttggatgtctacgagccatttctagggtggctgtagccttttaagttcagattatgcctaataggatttgtactttcgggcttcgatacctgagccgtccgaacttgccttggacgacagtccccgagtgggtgtgatctctttgaactggatagaggcagcccttgtgctcggtatccttaaggaacaaaatgtaatagtctgaagggacaaaatatgtatctacaaggtggaaactttctttcattcttgtgcggaatatacaagattgtaagtgtgtacaagctttgtattagggcttaagtggtctatgcggacacggttcatttgaccatttggcccttacaataaatcttatcccacaagaccaaaatgttcaagcacatagtttccttccttgctaaaatcagtacccgagggtgatggcccccagtattctaggtcgatcgtcgagaggtcttggatattgttgatgtgaccctcgattctggttcataaccagtttcgattctaagttagcatgatccaatgttgcctcattaaaaacttgccgaaaaacccatttgggacaaaaccgattcaagggaaaaatagtgcaatgcgtgctttcaggcctaatagctgcatcattccttggatattgcctgcaagttttctaattcgtaatatacataaagagaagaatgaatggggtcataccttaacaatagtatcatttttagtgggttacattcaagttgtttggtagtcgctcaccattccctactttgggtttgtatgaacctttactggtaatctctacagttagatatggaccttcccaattcggtcctagattccctttgttcgggtttcggatgttcagtgtcacctttgtcaacaccaagttcccaatattaaaatgtcaaaggttggctatacgactgtaatacctttcgatccatcatttttgggcggccaaccggacaagggcggcctcgtgcctctcgtctaataattccaagttcatgctcatggactcaccatttgactcttcaatcgcatatcgaaactgaaaatagattctcctacctcgaccagtgttagcacttcaacacagtagaccaatgagaatagggtggccccggtactagattttgaggttgtatgatatgcccacagtacttcgggcaaaatttccttccattttccttaggcgtcggtcaatctcttcttaaggttttggagtatggtctttttagtagactctgccttccatttccactagggtgatagggtgttgataggatctttttgatcttatggtcctcaaagaaaattctcaccttactaccaatgaactgctcatcgttgtcgcatacgatcttggccggcactccgaaccggcaaattatgtggtcccaaatacaatcaataacttctttcttcatgactttctcaaatgtccgggcttcaacaaatttagaaaaatagtcagtcataaataatataaattgagtcttgtagggtgcctatggcaggggaccgacgatgtccattccccatttcatgaatggcgaaggtgacaaaactgaatacagcagcttcccaggctggtggatcattggtgcattcctttgacatccatcgtattttcatacgaactcctttgcatctttctccatgttgatccagtagtagccggctctgattatcttaagaacgagcgattcggcacccgaatggttcccgcaggtgccttcgtgaacttcctcaagacatatttggtatttcccggtcctagacatagggcgagtggtccaatgaacgttctccttaatagggtgttatcttcgaacatacaaaacctggccaccttcgtgtacataactcttgattctttagggtccgagggaaacttctcggtcttcaggtaatctatatacatgcttctccaatcccaagttaagcttgtcaagtttatctcgacgtggccctcttccactaccaatttcatgagttgtacaaccgttcccgagctgaattcatcgtcatcaaccaacgatccaaagttagctagagcatcggcctcgctattttgatcccggggtatatgttgtagggtccattccttgaattgatgcagtgttacctgtaatttatccaggtatctttgcattcgttcctctttcacttcgaatgtcctattgacctgattcactaccaggagggaatcacacttagcttcgatcacttcggcccccaagcttttatctagttcgagacctgcaatcattatcctcatactcagccttattattagtcaattttacagttctaatatattgcctaactacattaactattggtggctttgacatgatgccaagtctggacccttttgcgttcgaggaaccatccgtaaagagggtccatatccccgaggaagtccccgagttcaacaacaattcccttacaacctcaagtattaggataggcgtgaagtcggccacgaagtctaccaaaatttgggatttgatggcggtttggggtcgatattcaatatcgtacctgcagatttccatggcccatttggccaatcatcttgagagcttgggtttatgtattatgtttcttaacaggtaggtagttacgacacatatgggatggcattgaaaatacggctttaacttcttggaggcgcttagcaaggtgaacgccaatttttccaagtgaggatacctagtttctgtcacgacccaaaatccactaagggccgtgatggcgccggacaccattgtcaggcaagccaacactaaataactagtaatttctcgttttagatatttctgaattcagttcttttatacatttaaacaataaggaataaattcccgctgaataaataatgatatctttaacaatttcaaaatactgactacttccatagacatcctagaacctggtgtcacaagtgcatgagcatttactagagaatgaaataaaatatagaaactgtccgaaatacaagtagacagaaatgaaaatacagtacaatactctgaaggagactccgctggctacgctagtctcgataactgcaactcacataagtctccgtatcaaccatgccgctatgccactaagccactagccacacataaacatgtgcaacaaaaatgcacatcaagtgtagtatgagtacgaaaacaacgtgtacccaatgagtatcccgtctaatattgaagaagtagagacgagaggtcgacttcgacacttattagtggtccaatagtaatatattataaatgcaagtaatcatggagttattaagaccggtagtaatttcaaataagtcacgaacaggtaaaagttccttttatattaaaaatatccggattcataatctattaatttccaattatctcaagtcagggagagcaaatatcagtatcgataaatctcaaggcaagcaataaaagcatgcgcaaatcctgccgaggacgtatgacccgattcaacaatatttaaactatgcactgccagagcgtcgaatgatgcaaaccatagatgcatctatttaatcaccgaggcgttcgacccgttccgaaattaaacacatacagacagtcaatcaagaaatcaacaaggaacaattatccaaagaaaagcctttaacaattttataaaactgaagtttaatccttttagaaattcatttaccaattcaacaggatttaagcaattcagttgtcaataagattaaaaatattccaagtatagcatgctttttgggtcctagactacctagacttaaacataatagtagctacgcatggactatcatcacctcgtgcgtacatagcccccacaaataggagcacataaccaattatttcaactatggggacaattccctcttacaaggttagaaaggagactcacctcgctccaaagttccataatcggcattccacgcccttccgaagactcaattcgatgcaaaaatgctccacaactagccatttatcatctaagcccattaatatatgctcaagtactcattataatccaatttataacaatttctaaccccgatcgaaaagttgacaaaattgccctcaggcccacatgcccggattccgaaatttctcgaagataaattttacccatggactcacgaactcaaatatatgattttctcttaatttcatacgcaaaattgtggtcaaaatccaagaatattaattttctaggtttcccctaaatccccaagtttctaccaaattttcatgctcaaatccgcacataatcaatgtatttaactcaagatagatgtggttagcttaccttgtcattgatgatgaaaaaccccacttgaagctctccaaaagtgtccacaccatatgaaaatgggggaaaaaaagaccaacccccgattttaaaagaacttactgcctccagcacttctgcacctgcggtcacatgaccgtttctgcggttccacaggtgtggcccctttaccgctcctacggtttctctccaggctccctttttccgcttttgcgccttaacttcgcaggtgcggtcccgcttctgcgacgagatgactgcatctgcggtccttacacttccaacccaaaatcgcatctgcgactctcctgactgcttctgcggctccgcacctgcggccaaaaactcgcaggtgcggttacaccagatatcagctgcctcaatccatcctcaaattccaaaattgatctgttaaccatctggaatccactcgaggcccccgggacccaaaccaatcataccaaccagtcccaaaacacattacagacttgctcgaggcctcaaatcatatcaaacaatgcaaaaatcatgaatctatctccaatccaggcttaatgaactttagaatttcaaacttcaacattcgatgctgaaacctataaaatcacgtccgattgacctcaatctttttgcacacaacaaaaagtccactttcggtcaaacttttcaaaaaccttcaaatttctatctttagccaaatgactccaaaatgacctacggatctctaaattcacttctggtcacgcccccaataccagaatcaccatatagagttattcctggaatcggaatctcaaacgcacattgataaccctgaaatgcacttcaatccaaacttatgagattcttccaaaaatgctaacttccataataggcactaaaacgtacccagtccggacatacgcccaagtccgaaatcatcatacaaacttgctggaaccttcgaatcccgattctgaggttgtttactcaaaaatccaatcttagtccattatttcaccttaaagcttccgaattgagaatattctttccaaattaactctgaacttcccgaaattcaattccgaccatgcgtacaagtcataatacccgaagtgaactgctcatagcctcaaactactgaacgacacgctaaagctcaaaacaaccgatcgggtcgttacattctctcccacttaaacacacgttcgtccttgaacgtgctaagaactgcactgaagttgttctaaatcactgtctaacacctcgagcacctacccacgctaccacaactcagctgggcaccctagctcgatcaatctgaagataccctttttcacttaggcaattaagccttagagcccaattccaacattcgaaattctctgccaggcttgctccaacatatgctcacttaatcaataactacacgcagcaccaaaacatgactgcataccttagttgaattcacaccttgcaccactttactcacaggaccacaataacattctcttatcaatttaatcaaaattccatgactgtgatgctcccattgcacctcatgacatacataggtcttgccctaactcttacaatacccccacgacggaaaagagtgtagaaattcataactaactaccgaatcgacaattcattgggtctatattcctttcaggaaccatcaccctattctgaaccaaataatggtctttgctccttaatatacttcatataatcatattgcaatgatcctaaatccaatgatctcagctcaccccgtccgtactactcaggcaataagccatccaaaacatgatcaaaagtctcatatgctaccacaatgtaccaatatgctaccaattcgaacatgatacataaaggaaatgaactctaaaaaggaaatccaattaccccgcttgcgaatcataatgcgacgcggacacatagctaatacgagttttccttagaaactaggaaacaaaatacataaaaatagatataaggaactgtactcaacatcatactgttgcggcgcgcaacccaatccaaacaacatacccatggtggcgtgccacccgatccacacataaaattcacataagcagttacacattgagctagattgctcattacaacaaaatatcgaatatcggtcacaagcacgctaagtgcataataccatccctagggagatatatagcgctataagctacaaactcaagcacaactggggtgcgatatacgatctgaatctcaagagccattctgctcatataacatcatctctacgcggaacctcaacacataagaaattcactaagccatctcataactcacacagcgcaatatatcattacatgaaatagctgatgacgaggtaataccccgactactctcccataaggagcgcattgctgaaatgaacacatctggcctgatatagagcccatattcacatttaaatccatccacagacctcaagctgattctgatcgcacttaactaggctaataacctttcaaagatccataatcaccccccttttctcataacacacaagaacaaccatcataatcggagtagtcctccacaatccacaacccaataatcgagtgccctctagtcatcaattctcaatttaacgacatcactacaatcttcatacttggtttaactcttcaatcagtcaagtggttgcatgccacatgttacaacccatattcacgtatgttagctcatggcataaggtattcgacgtaaatccataaagagattatctttaagatgataagaagttaatcttattggtcttaaatgatacaagcgtgtataaggggggttaacaagtattataagttaaacgaatcaaggatattgttagccgtatttttgggtaaacctagaggttcttaatacactcaagaggtagtgttttaaggtgtttgaatcatataatatccgtatcataagtcttgaagtgaaacaagttatgaaacaaaagtcgacaaaagttgccgcaacttaggttcatagttttacttaaacattaggtcaaatgttactaagattttctcccaatttacttagaattatgggatgatatacccaccaaatttaagatctatgagtctagtttccaacgcattaaaccgtttgtcgatacaatctcgaagtacagagatatttgtatttttgtgagactgcgccaaacacctctctatagggcccacttaggcagtttaagacatttggatatatatatatatatatatataatgatgccaacccatttaagttaattttttcactatattcagaccttagaaccctagaacatcatatcaaggttctctcaagattcaagacccaaataaaggcaaacaacacaaatcaagtgtcgggaatcctgtggcgctagtaagtttcttgttcttcttgttgttgctcatttttgtgttgttccagctcgtgagggaggttgttttaaggggtttatgttctgtaaatggtgttaaccctctagcctgatttataactaaattgttgcagtgtatcgataatggtggcacagttcttagtgtttgctgtagcaaataggcttagatcatcagcaacgaataggtgggaaatattggagcctgtgtggttgatcttaatggggaactagctaccattctgcgcttgagcctcaatgctcctagataggcttttcatacacatgatgaagatgtaggaagacatagggtccccttgtcccatgcccctgctaggatgaaagaaataagtcatacccacattcactaagatatagataaagctagtagatatacatgagaggatcaacttagtcatattattagggaaatcaaaggacaccagggtatctcttataaaagaccattctaatctatcaaaagccttttctagatcaattttaaggatcatgttagcatttttccctttcattttattgaaatggctaatatattttctgcataatgatggaattgtcactagccctcccattggacaggaagttatcttgactagggccaatgttagaggggaggacaagtttgattctactaacaattattttagtgatcaacgtgtacattgtattgcagagtctaattggtctgaaattcttaagaattgtggcattgtcacacttatggataaagcataagtaggttgtgttcacaacatgcttcatttcaaggctgtggaaaacctacttacaaaaattggttactttatctttggtagaagagtgggtgaaggccatcaggcctatggtacttggttagtatgaaagagaacatagcagccttgatctcactgatccttaagggggcattcatattagtcttattacaccccatgttttcgtacatgaaattacgtcgtaagtcagttgatgtatgctcggaaattaggtcatcattaaaagtatataaagcaagttaatcatattactttggaggttaaaaatatttaagatcaataactacaagtaccaataggattagaaggtttagaagctaaacaaatcgaagaaaataagtttcgtcgaaatagcaagtcgggaatattataacccgtactttttgggtcatattagggttattaatatgataaggaggtgatattatgaggtgttttggtcatattatagtcgtgtgttatgttttgaaatcaaacgaattaagaaaaaaggtcgacaaaagttgtcacaagttacgttcataatttacgtaaaatttaggtctaatgttactgatcttttctctcaatgttattggatttatggggttattcatccaaaaaattgaatataaatgaatttattttccaattcattaaaccgttcatcaatacgatatcgaagtggagagatattttgcgagactacgtaagcagctccctttgggacccacaaggtcagttgaggattatcttgatatataaagttatagccttcatctctaaggctcatttcgacccatataagacctaaaaagtatctctatatatcttaaatacatccttagggttttggagcaattccataatccgcaactcaaaatcaagatgcgaacacatcaatgcgattctcacgacatatgtaagactttgccatccccttactccttataactcatgttttggaaagagcttcgtggctaaggaagattttctcctctatattttagttatacaagcataattaagggtatggatcaaagggaacaagttttggaagtgagaatacaagaggtatatagggttttcgtttcatttttgacatgatttgatttaactatgttctagacttttctcttaatcttttaagggttgttcaaggaaaattttagcatatatggtatccttgtataattcaattccatatgtgaattatggaagaaactagtttaggttgaaacttcaaagtacaataaaaacagaaagagtgaattgcccatttgacgtatgtcatccggacatatgtttattccgttcctttgatgtttttacgtatacctaacacccatataatcataatagcttcagttaagtatatataagcttaattattaggtgttgatgcatagattaatcctaaatcatatttatactttcatgtcacaagttagccactatgagtcgacattacgtcacagttctgttcatgttacgtcacaagttagccactatgagtcgacattacgtcagagttggacaaatatttagtttaaagggcatcccgttcctcaagttcttaatattaaccctaggtgatttcaaaccttctaaagtgattctagtgccggaaaatactaatagattgctagtttcacttccttgttgttgtgacagcattatagggatatttcatggacaattaaggtcaaattggagttgttctttctggctaaaggtaaggaacctcttactctacatgtatttaagattatccaagttgcggctaagtcattgaagctagaacttgtgaaatatatatcaaaaggcttggtagtaatgttatcggttggtggactattttgggaggttcaatatgattaacattgatgttgttttggctatttggttattttttcacttgtaggaagtcatataaataggggaggtgctgttcgcttcctcgtaaaataggttgtgttcgatacatagtagttacgacgcctaaatgataacgatagtgtcatttcttattgtaggctaaggagccgtgaaattgcatatcttgaggttgggaagaatatacaaggtatgtgaggctatccctttccttcttttgcacgaccccgattgtacataatgtaatgaacaagattctaaagatactctactcttagaagctagcagtacttacattgtttccctttttatggagcgattgatgttgatgttgcatctcttattcttatgttatcaatgttgttggtatttccttattcttataagattaatgataaagcgttagtcctaataagtgtacagaggataccgaccttaatcactccggaaggttcaaaatattattccaatgagtccagcatgcattgtatatatgtatctattttactctaccgagccgcgctatagacggccgggtacaacacctattgtgcaaccactaatcaattgggttttaccaaactacatgtggtcgggtacgattctaccaagccttatgatggccaggtacgattttaccgagtcttttttgaggtcgggtatgatatgatgatgatgcccacagaggcgtgtgttttaaaagtttatgtatatatatttttgtatcatgcatttcatgtcagtagcctacagaggtacccagatattacaggttgtatattctctatccttattcacattactatatatacttatgtttttcttccttgcatactcagtactttattcgtactgacgtcttttttatttgtggacgctgcatcttgtgctgcaggtcctgatagacgggtagatgcagctcccccaccatagtaggctgcctagttcagcggttattgacgagatcccttctccggacttgtcgtggtcttggtatgcatttttgttatagacattatgggtatgtcagggccctgttccggctatgtttcaacacttatgttcctttagaggcttatagataggtgttggctcatgtatagtttggtatgccttgtcggctgaatttttgttgtatagcctttcatggtagcgtggtagctcgtaccttatatataatttcttgattatctggtcatcccatgttatgtatgttcatgccatcatattttattgttggttgtccatgatccatgtctaccatttatattgatctcgtcatccctaaaagataataaagaaggttagataaaatgtacgttggtgcttggcaagtatggctgggtgctagtcatggcactccagtttgggtcatgacaaacttggtatcagagcaagtgtgtcctaagggttgtctatgagacgtgtctagtagagtcttgattatggatgtgtagcgcgccacatttataatcaggagggtacatgacatctagggttgttaccttcttcctgaatctagatcgtgcgtagagttgagtcctaagtgttcgtctctaatattcaccttattctctttcagtaatgcctttgactaggaagcaaatgattagtagacggcttgatatagaagcgagagagggtaccagtcaggtgccccaagctagatcaggacaaggtgaggctcagagtgagatgccctctcatacctcatctactctatctcctccagaggatattaggaggcaccgagcacctccagttcctccttctggaactacagaccaagatatgtggagtgctttgcagttgttgactagcttggtagctgctcaggcttagacacagaatacaggtgatgttgataaactagttagtacgagagttcgtgattttattaatttagaccctccagtgtttaccggatcagaccccaaggaggacccgtagacttttattaactaggttcatcgtacactgtggggttatgcatgctagtgatatagaggtagtagagttggcttattatcggttacgggatttaacggttttctggtatgatagttgggagagatccaggggtccgaacgctccttcggctgtgtggaaggaattttttgaggcctttcttcgtcactacttgatagttgagatacgatgagctagagctgataagttcttgaaccttaggcaaggtaatatgagtgtgcgatagtacagtatgcagtttaattctttatcaaagaatactccccatatggtggccaagatgagtgatcgggtgcatatgtttgtgaacgggttgggaccatatctgataaatgagtgcacaacagcctccttggtggagggcatggatatttcccatattcaggcttatgcccagaccctagaggatcgtaagcgccaacaaaaggtagatagggagaaggataggggccaacataagagggcgagatttgtagggtattctgatgacttcggaggcagtgtcagatcccaatcttcgaggagttcggtgccatctgtagctagtgctcctctacagtttcagaggcctcgatatgatcgatttacctattcaggtccaggtcaaagttcgcgggcattaggctcgcaatataacagagatactagtcagacgagacccccaacatcacgttgtgatcagtgtggtaaggcccactttggactgtgccatcgaggttctgatgcgtgctattcttgcagacagcctagccatataatgcgggattgtcctaatataggaggtggtggtatggctcagccgactagatctgtgtctggttcttcgtcatcaatttgatctccagcatgaggttttcagcagtcgacaggtcgtggtagaggtagaggtgcagtgccgcattcgagtagtgctcaaaatcaaacctatgctctagtaggtcgacaggatctcgagtcgtctctagatgttgttacaggtatattgtctgtattttcttatgatgtatatgcgctgattgatctgggatccacattatcatttgttacaccctttgtggctaataagtttggcattaaacctgaattgataagtaaaccacttgcggtatctactccgataggagattctgtgatcactaggagggtatataaaggttgcacagtgatgatttgtagtcgtcaaacctcagcaaatttatttgagttagaaatggttgatttcgatgtgataatggggatggactgtttggcctcatgctatgcaaatattgactgtcgtacgaagatggttagttttcaatttcctggtgaacccgtcattgaatggaaggggaacattgctacaccgaaaggtaggtttatttcctatcttaaggcaaggaaaatgatctcaaaaggttacatttatcatatcgtttgcgttagggatgcggaggcgaagccgcctactctacaatcaatccccgtggtcaatgaatttccaaatgttttcccagatgaactcccaggccgtcctcttgaaagggagattgagtttagcattgatgtgttgcctgacactcaaccgatctatatcctccatatagaatggcctcggtagagttgcaagagttgaaggcgcagttgaaggacttgctagataagggcttcattaggcctaacacttcaccttggggtgcgccagttttgtttgtgcggaagaaagatgagtcgttaaggatgtgtatcgattatcgacagttgaataagtttactataaagaacaagtatccacttccaaggattgacgacctttttgaccaactccagggtgccaagtatttctccaagattgacttacgttcagggtatcatcaggtgaggattaaggagaaggatgttccaaagacggccttccggacaagatattggcactttgagttcttggtgatgtcgttcgggctaacaaataccccagctgcttttatggatctcatgaatactgtattcaggccctatcttgatgtgtttttgattgtagtcatttatgacattctagtgtattctcgttcggaggcggaacatgcgggccacttgcggatagtattacagacacttcaagattgtaagttatatgctaagctctccaaatgtgaattctggctgaactcagaagcattacttggccgtatgatatctgacgagggtattagtgtcgacactcagaagatcgatgcagtaaagaattggccgagaccgacaacaccatcaaaagtccgcagcttcctggggctagcaggatattataggcggtttgtagaagggtttttctttatatcagcaccattgactaagttaacacagaaaactaccaagttccagtggtctgacacttatgaacgtagttttcaggagctaaagaatcgattaacatccacaccagtgctcactctccctgaaggaacagaaggttatgtggtatattgtgatacctcaggtataggtgtggggtgtgtattgatgcagcgtgggaaggtgattgcttatgcatcaagacaattgaagaagcaagaaaagaattatccaacccatgatttggaattggttgcagtaatatatgatttgaagatatggcggcactacttatacgtcgtccatgttgacatctacacagatcacaagagtttacaatacatcttcaagcagaaagagttgaatttgaggcagcgtaggtggcttgaattactgaaagactacgacgtcgagatattgtatcatcctggtaaagccaatgttatggcagacgctcttagctgtaagctaatgggaagcttagtacacattgaggcaggtagatgggggttgactaaagagcttcatcagctagccaatatgagaatcagattgttagactctgatgatggaggtgttactgtacataatacatcagaatcatctttgttagccgaggtaaaagtacgacaatatgaagatcctatcttagtacgattgaaagagagcattcagtagtgtaaaattacggcttttgagatcggaggagatggggcactaagataccagggccgattatgtgtgcctaatgtggcagggttgtgagataagtttatgaatgagattcatcaatcccgatattccatccatcctggctcgacaaaaatgtatcatgatgtcaaggagcagtattggtgggataacatgaagaagtctattgcagaatttgtagcccagtgtccataattgtcaacaagtaaagatcgaacatcagaaacccggtggattccttcagaatatagagattccgacctggaaatgggaggtgattaatatggactttattattggattaccttgctcttatcataagtttgactccattagggtgatagttgatcgacttacaaaatgtgcccattttttgccagttaagacaacttacttggctgaagattatacgaagttgtatatcaaggagattgttaggcttcatggtgtgccggtatctattatattaaaccgaggagctcaatttatggctaacttttggaggtctttttagaagggtttaggcacacaagtaaatctcagcactgcatttcatccacagactgacggacaggctgaacgtattattcatacacttgaaaatatgctacgagcatgtgttctagatttcaaggggaatcaggatgaccatcttccactcatagaattcgcctacaataatagctaccattccaatattaaaatggccccatacgaggcactatacgggaggagatgtagatcaccagttggatggctcgaagtcggtgaaacagaattatatgggccaaatttgattcaccaaggcattgagaaggtgaaagtgatacaggagcgattgaggacggcataaagcaggcaaaagtcttattccaatgactgacgtcgtgatctggagtttgagtttagtgattgggttttcctgagtatctcaccgatgaagggtgttatgtgtttcgggaagaaaggtaagctgattctgcggtatatcgggatgtataaaattcttcaacaaattggacaggttgcttatgagttagaattgccatccgaattggaatttgtccacccggtattccatgtatctatgtttaggaaatgtattggagacccttctcgagtcatcccaatcaaagatgtacaagttatagaggatctatcatatgaagaagtgccagtggcaatattagatcgacaagtccgcaagctgagaacaaaatatgtagcatctgtcaaagtattatggaggaacaagaatatggaagaaatgacatgggaagcagaagagaagatgaagtctaaatactcttacctattccacaatgaagataacaaggatgttggtggaacgcaggatacattggaaggtgaaactgctctatgaggtaagcaataacttgagaatactcttccttaatacaaaatggtgatatgtagataatgtaaatatccataatgctttgtgtagccttgtgaggacatatgttgggcttaactgcttgcaagttttgctagtgaccattttataagggaaaattgaccggaaatttccattggaatccacgatgatttggactccccataaacctttacattcgaggacgaatgtccctaaggggggagggtgttacaatctatattcacgtatgttagctcattccataatggactcgacgtaaatccatgaagagattatctttaagatgataagaagttaatcctattggtcttaaatgatacaaagatgtataagggtggttaacaaatactagaagttaaatgaatcaaggatgttgtcagccgtatttttgggtaaacctagaggtgattaataaacttaagaggtagtgttttaaggtatttgaatcatataatatccgtatcataagtcttgaagtgaaacgagttatgaaacaaaagtcgacaaacgttgtcgcaacttaggttcataggtttacttaaacattaggtcaaatgttactaagcttgtctcccaatttacttagaattatggggtgatatacccaccaaattgaatatctatgagtctagtttccaactcattaaaccgttcattaatacaatctcggagtagagagatatttgctttttcgcgagactgcgccaaatacctctctatggggctcacttaggcggtttaagacatttggatatatatatatatatatatatgatacctccaaccctttttaagtcaatttttttcactatattcagaccttataaccctagaaacaccatatcaaggttctctcaagattgaatacccaaacaaagggcaaacaacacaaatcaagtgtcgggaatcccgtgtcgctagtaagtttcttgttcttcttattgttgctcatttttgtgttgttctagatcatgtgggaggtttatttaaggggtttatgttttttaaatacttactcaagttcttaatattaaccctaggtgatttcaagccttctaaagtgactctagtgtcgaaaaacactaattgattcctagtttcgcttctttgttattgtggcagtattggagggatattaaggtcaaattggagtttttctttctgtataaaggtaaagaacctcttactctgcatgtatttaagattatccaagtttcggctaagtcattgaagctagaacttgtgaaatatatatcgaaaagattggtagtaatgttatcggttggtggactattttgggaggttcaatataattaacattgatgttttttgtctgtttggtgattgttttcacttgtgggaagtcatataaatagggtaggtgttgttcgtttcctcataaaataggttgtgttcgatacatagtagttacgatgcctaaacgataacgatagtgtcatttctcttattgtagactaagaagccgtaaaattgcatagcttgaggttgggaagaatatacaaggtatgcgaggctatccctttccttcttttgcacgaccccgattgtacataatgtaatgaatgagcttccaaagatactctactcttagaagctagcagtacttacattgtttcccttcttatggagcgattgatgttgatgttgtttctcttattcttatgttatcaatgttgttggtatttcctaattcttataagattcatgataaagagttagtcctaataagtatacagaggatatcgaccttaatcactttggaaggttcaaaatattattccaatgagtccagcatgcattgtatatatctatctattttactctaccgagcctcactatagatgtccaggtacgacacctattgcgtaaccaatgatcagttggggtttcccgagctccacgtggtcgggtacgattctaccgagccttatgatggtcgggtacgattttaccgagtcctttctgaggccgggtatgatatgatgatgatgtccacagaggcgtgtattttaaaagtttatgcatatatatgtttgtatcatgcattttatgtcagtagcccacagaggtacccagatgttacatgttgtatattctctatccttattcacattactattcatagttacgcttttctgccttgcatactcagtactttattcgtactgacgtcctttttatttgcggacactgcatatcgtgctgtaagttctgatagatgggtagacgcagctcccccaccacagtaggctgcccagttcagcggttattggtgatatcccttctccggacttgctgtggtcttggtatgcatttttgttatacacattatgggtatgtcggggccattttctggctatgttgcaacacttatgttcttttagaggctcataaacaggtgtggactcatgtatagtttggtatgccttgtcggctgaacttttgttgtatagtctttcatggtagagcagtagctcgtaccttatatatagtttctttattttctggtcatcccatgttatgtatgtccatgtcatcctattttattgttggttgtccatgatccatgtctaccatttatattgattgcgccagccctaaaaaataataaagaaggttagataaaatgtacgttgttgctcggcaagtatggtcgggtgctagtcatggccctccagtttgggtcatgacaccacacttatacaactttcccgtggggcacactcctacgacctttcgtttcagataacaggtctgtacatccaaaccaccagccgcactaacgctgaaaagcgatcaagaaccctcaaccaggatgcaaagcctttttcacaaaataccgacctcaagtgacactgaggacaataccaacttatttttaaacatccgaactcctttcctgctcatccgagctcgtgacatctttgtcaacaccgaatcgcaaccttgatcctcacttctaattccataccacttagtgcacccaacatgcccatatacgatagaacatgatttccatcataaccccggaaccactaatagatcaaaacttcatcatataaaaacttttcacttaactcacttcaggaggaccatatcaacacacaagtaaattctcataaccgtagaatatgcaattctctaagtagtagcctaagccaccatatccctttcgggatccgcctacacatacaggccataacaatagaatacttctgaataatatcaattacggcggccgacaagctcaccacgtaccgctaaaatccacttgcataacttgatcacgctaaaagaactgatcactaccaccaatctgccaattcaactatggctaaccaatctatcttcttccaatttatccttgattgccttagaaataataataaccccatctaacacataacacgctccattcgcactcatcccgagtgaccttgaatcacgagaccatgttgtctcaaatcccacaaactgtttcatacctcccaaatgctacactgcaagtcaaaacatcctagaagattctaggactcttcttataagctgctacaaagcttgatttttaaccgtacctataggctcgaaatcattacgcaccacactttacccctttgaatccactagtaccgttgttgagagccacccgctctgacttggccctgaatgttatcaattccatgaatcttctagtatatgaataccttctcgacgaagcacccggcaaaatcacttcccttggaacccgtatctatacaaggcgtaaatcctgaatcctctcatagaatcatcatccacagtcgcacgaccgatctctttgttgtataacccatagaattctttgcagaagcttcgccaaccatgtaaccgctggtctgctcactggagataacccacctgggaaatttacgtgccaacatattccaacgctgctgcacggggtacaatcattatgacatcaataactcatcctgagtccgaactcactctctagctgcacaggtccattcacccctcgtggaaatcaattaaaggtgtggcaacatccttccaatccaaagttatgttgtatccttcttcatttcaagcagctcctttccattgtacgaaatcttctaccgcataatagctcatacttcagcttaaatccatagaccccaatcacccatcactaaaattcccaaatcattccaaactttccttaaggtgcgtagtcatcctaccacaaaacccacatgcaactccgccactcttccgctttggcggaactcactcctttaatcaactacttgaccttcacttcttatacctggccttctagaaattttaaccaccacctgacactccccatatgtctttcctcatcctttgctgcttagttgttgccttaactaaaatccatctttgtagcacttgaacccacaaatcgctactaactttaaacctttccgaagatcatctttctcgagccgtcaacatttgaaacaccgattcaatcctgaaccaccacaccccgcgatctttgacagccgattttccagtacttttgtataataacatgccccaaaggtgaatcgtagaagatcataacaccgatgaacttaacacatccaatcgaggacgacaacactacatcgtagatgaaaattccaccacgctcgaaaataccatgtctcattgctccatcaccccaaatccggacattcataggccaattgcttttcctccaccagaaatgaaatatcagatctctgaattatgcactgagtggacttcctttcaaatcattcaccgccccaacacataggcaagtatcctatcatcaagtcaatactgtgtgataactaatcgtgagcatcatagcaacttgtgcatagcctccaagctcttagaggcacaactactgatccaaaacgatagaaaaaaaaatccttccacaaggcgatgacaatagcccaaccaactacacagggagaacatcccgcaccatatctgtagtaccattacaatccttcaattctcgatttataacaagtggttcgcgtcgtgtaagattgaataggaaggaaataaaagcataagtctcaaggaattaaaccacacaatgaggaatcaagaagggaagtgctcctaacagccctgcagcctctcgaagataagtacagacgtcttcgtaccgatccgtaaaactctactagactcgctcatgactcatgacacctaaggaaacctagtgctctgataccatgttgtcacgatccaaaatccactaagggtcgtgatggcaccggacaccattgttaggaaagccaacactaaataactagtactatcttgttttagatatttctaaattcacttattttatacatttaaacaataagaaataaattcccactgaataaataatgatatctttaaaaatttcaaaatactgactacttccatagacatcccaaaacccggtatcacaagtacatgagtatttactagggaatgaaataaaatacaaaaactattcgaaatacaagtggacagaaatgaaaatacagtacaatactctgaagaaaactctgctggctacggtcatctcgataactgtaactcacctaagtctctgtatcaaccatgccgctatgccactaagccactagccacacataaacctatgtaacaaaaatgcacatataagtacgaaaataatgtgtacccaatgagtattccgtctaatctcaaagaagtagagacgagaggtcgactttgacacttactagtggtccaatagtaatatattataaatgcgagtaatcaagaagttattaagtgtgatgacccaagaggtcatcacttgtttttaaaatgaattctgcattctgaggctttaaaaacctcttttagcatcacctcgatttgtgtgcacaatccgggcgcgtagccggaaagcctatatgtgaaaatctgtgaaaaaatgataaattttgactataaaatgaattaatttgacttcggtcaatactttgggtaaacggacccggacccatgatttggcggtcccggtgggtccataggaaaatataggacttgggcgtatgcccggaatcgaattctgaggtcccaaacccgagaaatgaatttatgaaagaaattgttttcttaaaaatataaaggtttttgaaagtgaaatgttatgtgaaacctgtggtattgggcccataatatggttcttccggagtccagtataggttcaatctgatttatatgtgttttcggtaaagtttggtaagaaacggaatccatttgacgtgattcggaccttaaatgcaaaatttgatgtttaaagaagttttgagaaatttcattgatcttgaggtttaattcgatgttcatgatgttattttggtgatttaattacacaaataagtctgtaggatgttttttaggttgggtgtatatttggtttgaagccccgagggctcgggtgagctttggataggccacggggtgcattttgaacttagaaaattgcaggattttgttggtatgatcaggcctgcaggcttcgcatttaacaagtccaagcctgcccttcctcgcaaatgtgagatgttcctcgcaatgccgaccttgaaaatgcgagggtgccttcgcaaatgcgatgtatgccggaaatgcttgaagtcgcaaatgcgacatttctgatcgcaaatgcgaaaagcccaaatttcctgaagggttcacaaatgcgagccttgtttcgcaattcccaagccagcagaggtcggggttcgtaattgcgaacccctgttcgcaattcccacatctgagacctgcaacttttatacttagacgaattttaacccatttttcatatcctctcaaaacataaacacactagggcgatttttcaaaggcttcttcttctccaaatcaattgtaagtcgtttttaactagtttccttcaattattaacatcttttaacatgatttcaacttaaaattaataattttcatggggaaaattgggtgttttgggtagaacctaggtttttcaaaaattggggatttggacctcgatttgaggtccaatttcaaaacaaattatatatttgggttcatgggggaatgaataattgggttttggtttgaacctcggattttgaccatgtgggcccggggctatttttgactttttgtgtaaaactttggaaaacacattttcatgcattggggttgattcatttagagtttattgatgcaattaagtaacttgtggctagattcgagcggattgatggtggaatcaaggggtaaagctataattgaaacgtgaattgtgttcgtggcatcgaggtaagtgtttggtctaaccttagcttgtggtattaggagttgtgtcttatttgctgcgagttaattgtggagtatgacgtatatgtgtggtgacgagtatctatacgtcggtgtcaagcatgcccgtgagtcttgtattgtaattgttatgactccgttgggaattatttcacttcacatgttattgaaatattattgtccccttgccgggatgttgttatattgccctggttcccttgccgggatgtcgttatattgctcttgttcccttgtcgggacgttgttatattgcccttgttcccttgtcgggatgttgttatattgctcttgtttccttgccgggattctttatgattgctattgatttgtaatttggagcgggtggtactcctgtcacgagataaataaaatgggagcgggtggcatgcctaccacaaggtaaatgaaatgtgagcgggtggcacgccttccacgagatacatgaaatgggagcgggtgtcgtgcctaccacgagatacatgaaatgggagctggtggcgtgcctgccacgagatacatgaaatgggagctggtggcgtgcctgccacgagatacatgaaatgggagcgggtggcatgcctgccacgagatacatgaaatgggagcgggttgcacgccagcaacgagatacgtgaaatgggtgtgggttgcacgcctgcaacaagatgtgaaatgaaagtgaattctgcctttgtttcccttatccttgttagtagttggattttggttcctttataattctcttgatattctgtttttacctgttattccccgaagcatgctttccccctaccatctttacttgcttatttctgttttactttccgttgtatattttataattgcacaggtttaattggtagtccggtcctagcctcatcactactttgccgaggttaggctgggcacttaccagcacatggggtcggttgtgctgatactacactttgcactatgtgcagatcccggagcagctcttggactgtagtttggaggctaccttcagtccacgcaaagatccaaggtagacttgcaggcgttcgcaggcactagcgtctcctctatcttttatttcctgtttcatctttctgcttcagaaacagtgtgtcttttatttttagaacttgtatttagcagtcttagaccgtctgtggtactgtgacaccaggttttgggtgattaaggcttgagcagttgtaatagatacaaatttcagatattttatcattttcttccgcttaaatttaaattttcgctgtttatacattatcgcttcatgtttgttaaaaagaaataaatggataatgaagtaattaatttaaaggattggctttcctagcttacattagtaggctccatcacgactcccgagggtggaaaattcgggttgtaacattaagaccagccgtaatttctaataagtcacaaacaggtaaaagttccttttatattaaaaatcttcggattcataatctattaatttccaattatctcaagctagggagagaaaatatcaatatcgataaatctcaaggcaagcaatacaagcatgtgcaaatcctgccgaggacgtacgacccgatctaacaatatttaaactgtgcactgctagagggtcgaatggcgtgaaccatagatgcatctatttaatctaccaaggagttcggcccgttccgaaattaaacacatacagacagtcaatcaagaagtcaacagggaacaattatccaaagaaaaatcaattctcttttaacaattctataaaaatgaagtttaatccttttagaaattcatttaccaattcaataggatttaagcaattcagctgtcaataagattacaaatattccaagtagagcatgctttttgggtcctagactacccggacttaaacataatagtagctacgcacggactctcgtcacctcgtgcatacatagaccccacaaataggagcacataaccaattattttacctatagggacaattccctcttacaaggttagaaaggagacttaccttgctccgaagttccataaccggcgttccacgcccttccgaagactcaattcgatgcaaaaattctccaaaactagccattaatcatgtaaacccattaatatatgttcaagtactcattataatccaatttataacaattcctaaccccgatcgaaaagttgacaaaattgtcctcgagcccacgtgcccggattccgaaatttctcgaaaataaagtttactcatgaactcacgaactcaaatatatgattttctcttaatttcatacgcaaaatcgtggtcaaaatccaagaatattaattttctaggtttcccctaaatccccaagtttctaccaaattttcatgctcaaatccgcacataatcaatgtatttaactcaagataggtggggttagcttaccttgtcgttgatgatgaaaaaccccacttgaagctctccaaaagcgtccacgccatatgaaaatggagggaaaatgaccaatccccgattttaaaagaacttactgcctccagcacttccgcacctgcggtcacatgaccgcttcagcggttccgcaggtgcggcccctttaccgctcctacggtttctctccaggctcccctttccacttatgcgcctcaactctcgcaggtgcggtcccacttttgcggcaagatgactgcatatgtggtccttacacttccagcccaaaatcgcatatacggctctcctggccgcttctgcggctccgcacctatggccaaaacctcgcaggtgcggttacaccagatatcagctgcctcaatccttcctcaaattccaaaatttatttgttaacaatccgaaatccacctgaggcccctgggacctaaaccaatcataccaaccagtcccaaaacacattacaaatttgctcgaggcctcaaatcgtatcaaacaacgctaaaatcatgaatcaatctccaatccaagcttaatgaactttagaatttcaaacttcaacattcgatgccgaaacctatcaaatcacatctgattgacctcaaattttgcacacaagtcatatttgacattatggacctactccaacttttggaattggattccgaccccgatatcaaaaagtccacttccagtcaaacttctcaaaaaccttcaaatttctatttttagccaaatgactccaaaatgacctacggacctccgaattcacttccgatcgcgctcccaataccagaatcaccattcggagctattcccagactcggaatctcaaacggacattgataaccctaaaatgcacttcaatccaaacttatgagattcttccaaaaatgctaacttccacaataggtgctgaaacgttcctgggtcttccaaaacccagtctggacatatgcccaagtacgaaatcatcatatgaacctgctggaaccttcgaatcccgtttacgaggtcgtttacttaaaaatccaatcttagtccattctttcaccttaaagctttcgaattgagaatttttattcaaattaactccgaacttcctgaaattcaattccgaccatgcgtacaagtcataatacctaaagtgaagctggtcatgccctcaaactactgaacaatgcactagagctcaaaacgaccggtcaggtcgttacactttcggcctcgcctagagtcctcctaacatagtagataggaaattgtgtaccttcctattcccgggccgggactccacttacctctatctcggatactgctaagtataggtacaactgcttgtctgacttgggagtatgaagcaaaggcaggctcgaaaggtaccgcttgagttattccaaggcttgttggcactccggggtccatgaaaagttcttcttcttcttcaataacaaaaagaaccgatggctcttgtcggaggaccttgaaatgaatcgacccaagggggctatgttctcggttagcctttgaacgaatttgacattgtccaccatggtgatgtcctctatggctttgatcttttcgggattgatctcgattcaccagttggataccatgaatctgagaaacttcccggacccgactccaaatgcgcatttctccaagttcagattcatattgtatctcttcaatatactaaaggtttcctgcaaatattttaaatggtcctctgcttgcagggacttaactaacatgtcgtcaatgtaaacctccattgattttcctatttactcttcgaacatccgatttaccaagcgttggtaagtttcttggtcatacagtctaccatatttaattatacacggagtaggcatcgagaaagctgagtatctcatggtcgtccattgcatagatcatgcaatcgatgttaggcaaagggaaaaagtctttggggcatgccttgtttaagtctttatagtctacatacattctcaatttatttccctttttaggcactaccgctacatttgctaaacaatccgagtacttaacttcccgaatggagcatattttaagaagtttggatacttcgtctttgataaacgcatgcttgacttcagaccgaggcctcttcttctgtttaaccgggtgaaacttcgaatccaagctcagcttctgagtagttattttcggtgggatccatgtcatgtcaagatgggaccaagagaagcaatctatgttagctataagtaattcaatgagttttttcctaagcccgggagttagtcccgtgcccaggtatacctttcgatcgggcaggtgctcgatcaacttgacttgctccagctcctacaatgtttacttggtggcatcagaatagtcaggggctattgaagtcctagggactctgtagtcatcatccttgcatgtcacctgcttttatggttcggttggggctggcgtcagtgattgatatttggtttctcccttggtgactgaactcgagctcttcgatgtcgaaagtgtggatatcgggaccacctcatcgaccacgaacatttcttttgcagtcgattgttctccgtaaactattttgatccctcccagtgtaggaaatatcaatgcctaatgtagcattgagggtatctccctcatgttatgaatccatggcctcctgaataaagcattgtacctcatatctccttcgatcacgtagaactttgtttcttaaatggtcctggcggtgtttaccggtagggttatctcccctttagtggtctcgcatgcaatgttgaatccctttaagactcagactgcaggcactatttggttttgcatacctagttgttccacgatccttgatcttatgatattggccgagctacctgaatcaattaacacacgcttaactagagatttattttttagtacagatattaccagtgcatcattgtggggttgcatgatgcctttaacgtcctcgttgttgaaagatacggttccctctggtacatagtctcgagcccgtttttcccttgcaatggatactttagtgcattttaacatcgacccttggggatgtcaacttcaccaatgatcatgttaatgatgtgttgaggttcctcttctcaatctatttgttggtgtccctattcctgaagtgatttttggctcgatcacttagaaattctcggaggtgcctgttgttgaataaccgggctacttcttccctcagttgtcggcagtctttggttctgtagccgtgggtgccatgatatttacacattagattggggtccctttgggcaggatcagactgcaatggccgaggccactagtatctttaatacgtctgatggctgatacgataccgacaacatcgacgttaaagttgtattccgataaccttggtgcttctttggacccgataggtctgtcaaaaccgttctttctcatgagtccccaattattatgacctcgataactccttctttactccttgcaggggtgcgtccagacccactgctccttcaatctccactctacgattgatactaatctctgttcgatcttggctcatgatcgacgtctcttttggatctgtcactggtcctaacggggtaaatggacccagaaagggtctcgagctaatcatctttgaccctgatttttgtttggtgtctgttatggacgtcgacccaagttacagccgggtattctttcaaaatttgcttcaactgttgtgaagccaacgagctttggggattgagtccttgggtgaatacctgaacggctcaatcgtctacgactggaggcagatccttccgttccatttgaaaccttgacatgaactccctgagtatctcgttacatctttgctttaccttgaaaaggtctgacttcctggtctcgaccttgatggctccggcgtgcacttttacaaaggcatctgcaagcatagtaaacgagtcaatagaattaggggggtaagttggaataccatatcatagctccttttggcaaggtctctccaaccattttcagtagaacagattcgatttcatcatcctccaagtcgttccctttgatggcgcatatgtacgaggttacatgttcatttggatcagtcgttccattatacttcgggatttcgggcttatgaaacttttttgggatcgacttcagatatgcgctcgaggggaaagccttttggacaaacttcttggaatccaggcctttcagtatcggtggtgctcctggattttggtcgaccctggagttataggtctccacctttttgtcgttagcttcgattttcttttctcctatttctacccgttccgtcaattcctcgagcatatttattatctcggggttggccccggattcatcttcactcgcctttttgtggctggttaatttctgcgagtgtttttccggaattgttcgggctcaactctactgggagcaaggctttggttctgcaactgggctatcgctgcttgttaagcctgtagcatttcgaagatcacccgctagttgatctcatcgcctttatcgttgtgcgtatccctggctatcgacctggctcccacgcgaacactattttacggatcggtgggaaagttagcatcaatggccacatgggagttggcatcgattggacctgcgaccggcaccccgtaggggtcagcatggtgaacctcgttgctgggcactatattgttgttctcgccgtggtggccagattcagcatcaacgtttaggtgagcaaattgagagtttgacatctttaagatttcgtaaaattaagatctcaaagaacaagagaaaagtagagtgtgttatggaaatttgtatcaaatagccactattatccttagccccatggtgagcgccaaactgtttaccctaaagaacggataacaattaaatttatatgtgattttaaggatatgcggattaattctatacaaatgataaatagcgttagattaaatagataaaggccgtaataaattatcataccacttaagaggaatgactccgggatcggttatagccttaatggagtgcctgtcttcgatcccagattttcaaaaacgaagcactgatgaacaaaagtaagagctttgaataatagagaaaatgagagtatattgccttggtgtgcgtgttaaaatgtgtttaatgaataatcagacccccccccccttttatatagtcggggagttttagcctaagtacaattgcataaaagataaaaatcttccgtttaaataatcaccggttctctttcgatacgtgctgagattcacgtcgtgatatccggctggtcgcggatattaaagtcttttgttgatcgtgttcggttacctggtaatgctctccgaggcctttggggttcgaaccggacatggggccatgaccccgatactctcgagggcaagtgttttacccggacgctggatcgaggagctccttgcctcgattccggttccttgccttcacgtctctcgctccgtttgtttcatcgaaaatcgaagcgtctcgtgggatcggtttcactcgtatacaaaaataaaaagatacaatcttcctcgtgaattcagttgatgactagccttccgttttttctttccagcttttggaatgagtattggatatacgatttccacattattattgtttctcttcattgaaatctccactgccatgaaaaccgagatcgaaattttaatttggatagtgttttttggttatttagtttggttttagaatgagaaattaaaatttttaatttttttggttttgtttgggatttaagaaaataaaaaacgaaaacccaaattttttttatatatattatacagaaaagggctatatatgtccctctactatcgaatattagttatttatatcctctgttatactatttgacgtttcttacccttgtcgttagcctttttaacaaatctgcccctcccattgacggccccagtctgtgcggacacgtggcacatttttagaacccaaaccctttttctttccccacccaagatccatgcccgaaatctatactaaacccatatcaataataagaagcaagcttagtttattaagtgccttaatgcattgtctttcatcattgcaagaaaccatcaaatcaaaaccccgaaagtgaaaaataaaaccctgctactacctaattgattgattaaaaacaaaaactcgtgaaggggcgaaatatatcacgattaaaaagaaataaaaggtttacatcttcttcgttctatgctccttccttaagcaaaatgagggcttcagattcagtaggtagagctgggattggtcatttcttggttgttgtgatggctctacatgcacaggcaaaccttagtacttccttcaaccttgcttcatcttgcatttttagttttccacaaattaatttacccccgttatgatgatgtccatctcattgaagaagtattaggcatgtgcctaataagagttttctttggtttggtagccaaccttgttgacttggtttggttggtagccaaccttgttgaattagtttggtttggtagccaatcttgttgaatttctttggtttggtagccaactttgttgaattgtgaaaagtgtgtgtaaattgtcaaatattgtaggctttagagggtgaagctttggctataaaaggagagcttcaactctcatttctacacaccaacaaagagagaaagaaagagtgaggtttcacagacaaggtataagaaaatagtctgtgaggaaaatagagagtgggcgatatcgtagtgaggtgggaatatcaaaagagggttatttcttttgagtgttgtagtggtctttggagtatttatctccgacctacaaagtgtaaaattccttactatagtgatatcagttgctcctctcggggtcgtggttttttcccttattcagaagggttttccacgtaaaaatcttggtgtcattgttactcttttattcttgttaattaccgtatctcggtgctacattattattccgctttattaccgtgaatattattttgttaaggggtttattcccaacaactggtatcagagcacaggttctgctcgttcactgaaatactattcactgtcggtagtactatacttggtggaaaataaaaatgtccggagtaaagtacgaggtagcaaaattcaacggagataacggtttctcaacatggcaaagaaggatgagagatctgctcatccaacaaggattacacaaggttctagatgttgattccaaaaagcctgataccatgaaagttgaggattgggctgacttagatgaaagagctgctagtgcaattaggttgcacttatcagatgatgtggtaaataacatcattgatgaagacactgcacgtggaatttggacaaggttggaaagcctatacatgtccaaaacgctgacaaataaattgtacctgaagaagcagttatacgccctacaaatgagtgaaggtacaaattttttgtcacatttaaatgtgtttaacgaactaatcacacagcttgccaacctcggagtgaaaatcgaggaagaagataaagccatcttgctattgaactcgttgccatcttcgtacgataatttggcaacaaccatcctgcacggtaagactactattgagttgaaagatgtcacatcggctcttctactcaatgagaagatgagaaagaagcctgaaaatcaaggacaggctctcatcacagaaggtagaggcaggagttatcaaaggagttcgaacaactatggtagatccggagctcgtgggaagtcaaagaaccgatccaaatcaatagtcagaaattgctacaactgtaatcaaccaggtcacttcaaaagagattgcccaaatccaaggaagggcaaaggtgaaaccagtggccagaagaatgacgacaacacagccgccatggtgcaaaataatgataatgttgtcctctttataaatgaggaagaggaatgtatgcacctgtcaggtccagagtcggaatgggtggttgacacagcggcatctcaccatgccacaccggtaagagatcttttttgcagatatgtagcaggtgatttcggcacagtgaaaatgggtaacacaagttactcaaagattgcggggattggtgacatttgtatcaagacaaatgtcggatgcacattggttctaaaggatgtgcggcatgtacctgatttgcggatgaacttgatctcgagaattgctttagaccgagatggatacgagagttattttgaaaatcaaaagtggagactcactaaggtatcattggtgattgcaaagggagttgctcgtggcacgttgtacaggacaaatgcagaaatatgccaaggtgaattgaacgcggcacaagatgagatttctgtagatttatggcacaaaagaatgggtcatatgagcgagaagggattgcagattcttgccaagaaatcactcatttcttattccaaaggtacaactgtaaaaccttgtgactactgtttagttggtaagcagcatagagtctcatttcagacatcgtctgaaagaaaattgaatatacttgatttagtatattctgatatttgcggcccaatggaaattgaatcaatgggcggtaacaaatattttgttacttttattgatgatgcttcacgaaaattatgggtttatattttgaaaaccaaagatcaggtgtttcaagttttccagaaatttcatgctctagtagaaagggagacgggtcgaaagctaaagcgccttcgaagtgacaatagaggtgagtacacttcaagggaattcgaagagtattgttcaagtcatgggatcagacatgaaaagacagttcctggaaccccacagcacaatggcgtagccgagaagatgaaccgcaccattgtggagaagatgagaagcatgctcagaatggctaaactgcctaagtcattctggggtgaagcagttcagacagcctgttacctgatcaataggagtccatcagttccgttggtgtttgaaatcccagagagagtttggaccaacaaggaggtgtcctactcgcatctgaatgtgttcggttgcagagcttttgcacatgtaccaaaagagcagagaacaaagctggatgataaatttgttccctgcatatttatcggatatggagatgaagagttcgggtacagactgtgggatcctgtaaagaagaaggtcatcagaagcagagatgtagtcttccgagaaagtgaagttggaactgctgctgatatgttagaaaaggcgaagaatggtataattcctaactttgttactattccttctacttctaacaatcccacaagtgcagaaagtacaaccgacgaggttgccgagcaggtggatcaacctggtgaggttattgagcagggggagcaacttgatgaaggtgtcgaggaagtggagcaccccattcagggagaagaacaacctcaacctctgaggagatcagagaggccaagggtagagtcatgcaggtacccttccacagagtatgtcctcatcagtgatgagggggagccagaaagtcttaaggaggtgttgtcccatccagaaaagaaccagtggatgaaagctatgcaagaagagatggaatctctacagaaaaatggcacatacaagctggttgaacttccaaagggtaaaagaccactcaaatgcaaatgggtctttaaactcaagaaagatggaaatggcaagctggtcagatacaaagctcgattggtggttaaaggcttcgaacaaaagaaaggtattgattttgacgaaattttctcacatgttgtcaaaatgacttctattcgaacaattttgagcttagcagctagcctagatcttgaagtggagtagttggatgtgaaaactgcatttcttcatggagatttggaagaggagatttatatggagcagccagaaggatttgaagtagctggaaagaaacacatggtgtgcaaattgaataagagtctttatggattgaagcaggcaccaaggcagtggtacatgaagtttgactcattcatgaaaagtcaaacatacctaaagacctattctgatccatgtgtatacttcaaaagattttctgagaataactttattatattgttgttgtatgtggatgacatgttaattgtaggaaaagacaaggggttgatagaaaagttgaaaggagatctgtccaagtcatttgatatgaaggacttgggcccagcacaacaaattctagggatgaagatagttcgagagagaacaagtagaaagttgtggctatctcaggagaagtacattgaacgtgtactagaacgcttcaacatgaagaatgctaagccagtcagcacgcctcttgctggtcatctaatgttgagtaagaagatgtgtcctacaacagtggaggagaaagggaacatggctaaagttccttattcttcagcagtcggaagcttgatgtatgcaatggtatgtactagacctgatattgctcacgcagttggtgttgtcagcaggtttcttaaaaatcctggaaaggaacattgggaagcagtcaagtggatactcaggtacctcagaggtaccacgggagattgtttgtgctttggatgatctgatccaatcttgaagggctatacaaatgttgatatggcgggtgacattgacaacagaaaatccactactggatatttgtttacattttcagggggagctatatcatggcagtctaagttgcagaagtgcgttgcactttcaacaactgaagcagagtacattgccgctacagaaactggcaaggagatgatatggctcaagcgattccttcaagagcttggattgcatcagaaagagtatgtcgtctattgtgacagtcaaagtgcaatagaccttagcaagaactctatgtaccatgcaaggaccaaacacattgatgtgaaatatcattggattcgagaaatggtagatgatgaatctctaaaagtcttgaagatttctacaaatgagaatcccgcagatatgctgaccaaggtggtaccaaggaacaagttcaagctatgcaaagaacttgtcggcatgcactcaaactagaagacagtgctacctcctctgaatgaatgagactggagggggagattgatgatgtccatctcattgaagaagtattaggcatgtgcctaataagagttttctttggtttggtagtcaaccttgttgacttggtttggttggtagccaaccttgttgaatttctttggtttggtagccaactttgttgaattgtgaaaagcgtgtgtaaattgtcaaatattgtaggctttagagggtgaagctttggctataaaaggagagcttcaactctcatttctacacaccaacaaagagagaaagaaagagtgaggtttcacagataaggtataagaaaatagtctgtgaggaaaatagagagtgagcgatattgtagtgaggtgggaatatcaaaagagggttatttcttttgagtgttgtagtggtctttggagtatttatctccgacctacaaagtgtaaaattccttaatatagtgatatcagttgctcctctcggggtcgtggttttttcccttattcagaagggttttccacgtaaaaatcttggtgtcattgttactcttttattcttgttaattaccgtatctcggtgctacattattattccgctttattaccgtgaatattattttggtaagggatttattcccaacacattatttatttataaacaagcttaatttgggataagaaattataaaggtattaccgttaatgggaggggcatatttgttaaaaaggctaacgacaaaggtaagaaatataacggagtttataaataattaatatccgatagtactagatatataaggtctcattattcatctttaaatacaaccccttattctcgttactaagtagtattttgattgggaaactttcatcgagcttctttaacttttaatatttacgagcaaaaatcagtctcatttgcacttgaattataatttattgtatttttatacctggacatgttactattaatattgtcttttaaaagttttaaccgtgactaatattaacaactctattttaagagatataatatgattacttctcattctctatgatattttttgccatagaatataaatatttaattatgttttttttttaatttttattcttctattatgcccaaagatctatttcttttcgattatgttaattatcttatactagtattagtacccgtgcgatgcgtggacaaatcatatcaaattgtgatgtagattgtttgaatcatgtgcaattaacctcaaaatataaacctctcagataaaaattatataatcattagatattaattaagaagcaggatatgaaattattgtttaaatctcgtaatggacaacctatttttgtctatattagtagtcaaactagtactagtatcatcagacactagttgtatgaggcattttttttatctcacatttttgtggactcatgtttttatggatccagaagtataagattagggtccacgagataaaaaaaagtcttatacaattcatgtaagttgtgtgagacacataataaaacttaataaaactttacttgctggatctgtacgtttgctattatccatgttttgaatatgaaacttgagcatccagcgaagagttgattttgtgctatctttcttacgtgttgacttgtcattcattgagttggcttttcatttaccttaaagacagacgtactatattattaatcaaaactagtagtcgtacccgtgcgatatgcggtaaatattaaaaaaatattaattaaattaaattatgatcgggtttgtttgatcctattagatcttattgctttattaaatttaaattgtcatcttattgtctatacgatatacccaataataaaatctctattaacttaaagatacttatatagtcagtgtaacttttttgttctatatttttctttattacgttatccattgtttagtattattacattgtcaatagaaatttttattagtatattactttgtttactccaaaccctacaatgtgagatattactgggtacgttgttattgtatattactttgtttactatttttgtctgctcactttctttttctaatataagagaagatatataattaattgttgttgaaatatttttttattttgaattttattctgttattcttaataatattatctaaattttaatgaataaaatctctattaaactaaagggacttatacaggcaacaaataactttttaatttttctttattttatcatccaatatttagtattattacattgttaataaaaaaatttattatcatattatttatttaatatttttctctgctactttatttttgtaatataatagaagatatatattttattaatcttgcaataattttattttaaattgttaaaaaaattttattatcatattatttatttaatatttttctctgctactttatttttgtaatataatagaagatatatattttattaatcttgcaataattttattttaaattttattctattgtgctcaataatattgtctggactttaatgaacaaattttcgattaaattaaagggacttatgtagtcatcgaataacttttttttatgtatttatctttattatatcactcatgtttgagtagttaatattattctaattattttattttaaaataattttaaaactccaacttaaaactactctcgccaatttgaacgggtagttatttttattatatatttatatttttcgttttttattataactaattataagatctatatttattaattcaaataaagtatatatatatatattgtagttttttttattttttattattttcgttttttataaatatttaaattcaaaaataataactaaataattaattaaatatttaaattttattatattttctcaataatatttaattttagtgaataattacactttttattttgaaaaagaaaaacgaaaatgatttaacaaaatcaaataaagaaattaactaacccaaaccaaccatcacccatgtttgagtagttaattcaggtaattaatttctttgttaatttttaataaataattgttattaactaattgtgccatatgttttttattgctttattttaattttttaatttaaaataaacttaaaattccaacttgaaactactcctcaatttgaatgggtaaattttttttttacttttattttatttaaaaatattttaaaactccaacttgaaactactctccgatttgaatgggtagtttttctttttcttttttcatttaattattaaagcaaattattttattttaaaataattttaaaactacaacataaaactactcccgccaatttgaacgtgtagttatttttattatatatttatatttttcgttttttattataacaaattataagatctttttttttaattcaaataaagtaaccaatatatatatatatatatatatatatatatatatattgaagttttttcattttttattattttagttttttataaatatttaaattcaaaaataataagtaataattaactaaataactaattaataactaattatatcatgtggcttttttttaggctgccacttggcttaaggagagggctttatcctctccttttaataatatatagatattttattttaaaataatttaaacactccaacttaaaactactcccgccaatttgaacgggtagttatttttattatatatttatatttttcgttttttattataactaattataagatctttttttttattcaaataaagtaaccaatatatatatatatatatatatatatatatatatatatatatatatatatatatatatatatatatatatatatatatatatatatatatatatatatattgaagttttttcattttttattattttagttttttataaatatttaaattcaaaaataataagtaataatttactaaataactaattagtaactaattatatcatgtggctttttttaggctgccacttggcttaaggagagggctttatcctctccttttaataatatataaatattttattttaaaataatttaaaaactccaacttaaaactactcccgccaatttgaacgggtagttatttttattatatatttatatttttcgttttttattataactaattataagatctttttttttaattcaaataaagtaaccaatatatatatatattgtagttttttcattttttattattttcgttttttataaatattttaattcaaaaataataactaataattaattaaataactaattatatcatgtggttttttttaggctgccacttggcttaaggagatggctttatcctctccttttaataatatatagatagatattttattttaaaataattttaaaactccaacttaaaactactcccgccaatttgaacgggtagttatttttattatatatttatatttttcgttttttattataactaattataagatcttttttttaattcaaataaagtaaccaatatatatattgtagttttttcattttttaatattttcgttttttataaatatttaaattcaaaaataataactaataattaactaaataactaattagtaactaattatatcacgtggcttttttttaggctgccacttggcttaaggagagggctttatcctctccttttaataatatatagatttttattttaaaattaatttaaaactccaacttaaaacttctcccgtcaatttgaacgggtagttatttttattatatatttatatttttcattttttattataactaattataagatcttttttttaattcaaataaagtaaccaatatatatatatatatatatatatatatatataatatatatatatataatatatatatatatatatatatatatatatatatatatatattgtagtttttttattttttaattattttcgttttttataaatatttaaattcaaaaataatagctaataattaactaaataactaattagtaactaattatatcatgtggcttttttttaggctgccacttggcttaaggagagggctttatcctctccttttaataatatatagattaaaaataaacttaaaattccaacttaaaactactccccaatttgaattggtaatttttttttacttttattttttgttttaaaattattttaaaactccaacttgaaactactcttcgatttgaaagggtagtttttcttcttttgtttccatttaattattaaagctaattattttattttaaaataatttaaaactccaacttaaaactacttccgccaatttgaacgggtagttatttttattatatatttatatttttcgttttttattataactaattataagatctttttttttaattcaaataaagtaaccaatatatatatatatatatatatatatatatatatatatatatatatatatatatataatgtagtttttttattttttattattttcgttttttataaatatttaaattcaaaaataataactaataattaactaaataactacttagtaactaattatatcatgtggcttttttttaggctgccacttggcttaaggagagggctttatcctctccttttaataatatatagatagatattttattttaaaataattttaaaactccaacttaaaactactcccgctaatttgaacgggtagttatttttattatatatttatatttttcgttttttattataactaattataagatcttttttttaattcaaataaagtaaccaatatatatatattgtagttttttcattttttattattttcgttttttataaatatttaaattcaaaaataataactaataattaactgaataactaattagtaactaattatatcatgtggcttttttttaggctgccacttggcttaaggagagggctttatcctctccttttaataatatatagataaccattacgcttccggtattggggatgatatcctttcttttggggtaccattaattcattaatttgtacaaagtgatagagcttgacgtttactcatatgcccctttcttatgtggtatgcatatagatgctgaaattttaacagatcaagataaatcctaaatttatgattattcttaaaataataggagtctatcaggattacttggtggctactccactgtcacgacccggactttctaccctcgggaatcatgatggcgcctactaatgtgagctaggcaagccaatccttaacaacttacttcattaacaaatcacttattttaacgattatcagtgatagcatgaaaacatcagaatttagtaaatgtacggaagacttaaattaaagaaactgaacaataatacggaaatcaacatatgcctctacccaagaactggtgtcacattactcaccaacttctaagagtactaaatacaaccgtttgaaagaaaaatataaactgtttgtctcgaatacatgagataacagactgaaataaagagagaggagacgccgggcctgcggacgcttgcaaggctaccttggtgtctcactggactgaaagcaggctcccgcgttactgctgctgtccaagacctggatctgtgcaaaagagcacagagtgtagtatcagcacaaccgaccccatgtgctggtaagtgtctggcctaaccccggcgaggtagtgacgaggttaggaccagactccagataaacctgtgcagttatatactatatgacggaaaagtaaacaggtaataagcaatcaaagctggaaaaaggggaaacatgctccgggggtagcagataaaacagaataccaaagaatagtaaggaaactacaatttaacttctaacacggataaagagaaataaggaaactttcactttcagtttcatcttgttgcaggcgtgcaacccgatcccatttctcatatcttgtggtaggcgtatcacccgctccgattttattatatctcatggtaggcgtaccacccactcccatttcattatatcttatggtaggcgtaccacccgctcccatttcattatatctcgtagtaggtgtaccacccgctcccatttcattatatcttgtggtaggcgtaccacccgctcccatttcattatatctcgtggtaggcgtaccacccactcccattccattatatctcgtggtaggcgtaccacccgctcccatttcattatatcttgtagtaggcgtaccgcccgctcccttttacatttcatcacacaatcacaagaaatcccgacaaggaaacataaataatataataacttcccatcaagggaacacaacaatgttataattttcccggcaagggaacaacaatattgaattagtcatcccggcaagggagaatcagctataccaacctcaactcaacttgtactcagttcaattattgaaaatgctcaatcatagaagatcattaagtaaagcacccaagtgtcatttaagaacacaacaactttcaatttaagactcacggtcatgcttgacaccaacttatagatactcgtcaccatgcctatacgttgtactcaacaagaagcaagtagcaagtatgactcaactcctaatccctcaagctagggttagaccaaacacttacctcgatgccttgatcaccactcaagtctcaactatagctttaccccttgattctaccaccaatccactcgaatctagtcacaagttacttaattacatcaataagtgctaaatgaatcaaccccaatgcatgaaaatgagttttctaaaattttacacaaaagtcagaaatcacccccgggccgacgtggtcgaaacttgaggttcggagcaaaacccgattacccattctctcacgaatccaaatatataatttgttttgaaatcggacctcaaattgaggtctaaatcaacaattttagaaaacctaggttctacccaaaacacccaatttcctccatgaaaatctttgatttgaagttgaaatcatgttaaaagatgttaaggagtgaacaaaatgagttagaaatcacttatcaacgttttggagaagaaaggttatttgaaaaatcgccttttatgttttggggttttgaaaaagtgaaaaaatagctcgtttatttatacccctctcagacccacagtgtggaccgcatcaaatggaccgcggtcgcacagcctctaccgcggaccacacaaaggcgactgcggccgcgctggcccctccctgaagacctgcagttcaacaccctgggcggaccgcacaaaggcgatcacggccgtgctggcccctccgctgtcgcacacaatttctcgcggaccgcactagagggttcagagaatgcaacatttgactttctaagcctaaggcatttcggagcccattcgaaactcacccgagccctcgaaactccaacccaagtatacacacaacctcaaaaatatcctacggatatattcgtgtactcaaatgaccaaaataacatcacaagcattgaattaaacctcgagatcaataaaatttctcaaaactcttttaaacataaaatttctcaattaaggtccggatcacatcaaacgacgtccgttttaaccaaatttcacaagaatgactcaagtcatatataagacctgtaccaagtaccagaaccaaaatacgagcccgataccattgctttctaatcagtttctcacttcaaatttccttaaacaatttctaaaaataatttcacttaaaaattcatttctcgagtaagggaactcggataccgattccgggcatatgtctaagtcccatattttcctacggaccctccgggaccgtcaaatcatgggtccgggtctatttacccaaaatgttgaccgaagtcaaatttattcattttaaagtcaagacttaacatttttcacagaatttaatatttaagctttccggctatgtggctggaatgcacatgcaaatcgaagcaacttcaaatgaggttttcaaggcctcggaagtacataatgggtaagaaaacaggtgatgaccctttgggtcgtcacattctccacctctaaaacaaccgttcgtcctcgaacggacagaagaaggaagtaactgagtcagggaataaatgaggataatggctccacatatcgaactcggactcccaggtcgatgccgtaggaggctgacctctgcactgaacacgaaccgaaggaaaactctacgacctcaactgacggacctgccggtctagaatagccaccggctcctcctcataagacaagtccttgtccaactagacagtactgaaatctaacacgtgggatggatcgctgtgatacttccgaagcatggacacatgaaatactggatgcacggctgatcagttaggcggcaatgcaagtctacaagacacctctcccactcgatcaataatctcaaatggaccaatgaacctagggctaagcttgcctttcttcccgaatctcatcacgcccttcatagacgacactcggagcaatacccgctcaccaaccataaaagtcacatctcgaactttgcggtctgcataactcttttgcctggactgagtcgtacgaagcctctcctgaatgatcatgaccttgtccatggcctcctgaaccagatccgtacctaacaaccgagcctcccctggctcaaaccatccaacaggagatcgacatcgcctaccatacaaagcatcataaggagccatttggatactcgactggtagctgttgttgtaggcaaactctgctaaaggaaaaaactgatcccacgaacctccaaaatcaatgacacaagctcggagcatatcctctagaatctgaatagtccgctcggactggccgtctatctggggatgaaagcctgtactcaactccacctaagttcccaactctcgctgaactgctctccagaaatgcgaggtaaactgcgtacctcggtccgaaatgatagatacaagcacaccatgaaggcgaacaatctcccgaatatagatctcagctaacctcttggatgaataggagaccaccacatgaatgaaatgcgctgacttggtcagcctatcaacaatgacccaaactgcgtcgaacttcttccgagtcagcgaaagtctagtaacgaagtccatagtgatccgctcccacttccactcgggaagctcaatcctctgaaacaatccaccaggtctcttatgctcatacttaacctgcttaaaattcaaacattgagccacatatgcaacaatatccttcttcattctacgccaccaataatgtcgccgcaaatcctgatatatcttcgcggcgcctggatgaatagagtactaggaactataggcctcctttaaaatcaactctcgaagcccatccacattaggcacacaaactcgcccctgcaatctcaaaacttcatcatcacctaaagtaacctgcttggaacctccatgctgcaccgtgtctctaaggacacacaaatggggatcatcaaactgtcgatcacggatacgctccaataatgaagatcgagtgaccgtgcaagctaatattcggctaggctcaaagatatccaatctcacaaatcgattggccaaagcctgaacatccaacgcaagcggcctctcaccgaccgaaatataggcaagactgcccatgctggctgactttctactcagagcatcggccaccacgttggcctttcccaggtgatataagatagtgatatcataatccttcaacaactccaatcatctcctctgcctcaaattcaactccttttgcttgaacaaatactgaaaactcttgtgatcagtgaacacctcacatgtcacgccatacagataatgcctccaaatcttcaatgcgtgaataatggctgccaactctaaatcatggaccagatatttcttctcatgaatctttaactgccttgaatcataggcaatgaccttgccatcctgtatcaacactgcaccaagcccaatacgggaagcatcgcaataaactatgtaaggccctgaacttgtgggcaaaaccaacactggtgcggtagtcagagttgtcttgagcttctgaaagctcgcctcacactcgtccgaccatctgaatttggcacccttctggttcaacctgatcatcggggctgcaatagatgagaacccctccacaaaccgatgatagtagcctgccaatcccaagaaactctgaatctctatagctgatgttagtctaggatagttcttgactgcctcaatctttttcggatcaacctgaataccctctgattatacaacatgacctagaaatgcaactgaactcagccagaactcacacttcaagaacttagcatataactgactatccttcagagtctgaagaaccactctgagatgctgctcgtgctcctcctggctgcgggaatatatcaaaatatcatcaatgaagactatcacgaacgagtccaaataaggcctgaacactcggttcatcaaatccacaaaagtcgctggggaatttgtcaacccaaatgacatgaccaagaactcataatgcctgtaccgagtgcggaaagctatcttaaggacattggatgccctaatcctcaactgatggtatccagatctcaagtcgatctttgaaaataccttggcaccctgaagctgatcgaacaaatcatcgatcctcggcagtggatacttattcttgatggtgaccttgttcaactgccgataatcaatgcacattctcatcgaaccatccttttcttaacaaacaacaccggcgcaccccaaggcgaaacactgggtctaatgaaacccttctcaagcgagtcctgcaactactccttcaactctttcaactcaggcaggtccatgcgatacgacagaatagaaatgagctgagtgcccgaagccaaatcaatgcaaaagtcaatatccttgtcgggcggcatacccggcaggtctgaagggaaaacctcaggaaactcacgaaccacgggacaaaatcaatagaggaaacctccgcactataatcttgaacataagctaaataggccaagcaccccttctcgaccatatgccgagccttcacataagaaatgacgctacatgtagaatgactaggagtccctcttcactctaaacgaggcatacccggtaaagctaaggtcacaatcttggtgtcacagtccaagatagtgtagtaaggtgatagccagtccatccctaatatgacatcgaaatcgaccatgtctagaagcaataaatccacgtgagtcttaagacccctaatctcaactcacaagagcgatagactcgatctaccacaatagaatcacccactggcatagacacataaataggaatactcaacgaatcactaggcatgactagatacggtgcaaaataagatgacacatacgagtatgtagaccctgtatcaaataacactgaagcatctctatcacaaaccagaaccgtacctgtaataactgcatctgaagcctcagcctcgggcttggctgggagagcataacatcggggctgggccccccaccttgaactacctctctaggatggcctgctactggctggcctctacctctggcggccagagctccacttctaggacctctaactccacctctaacacctctacccccacctctagctatctgggcgggctgtggaacatctagtgcctaaaccatagcacgagaaccctgatgcggagaactgctcgaagcccaagggaaataccttacaatgtgcctcgtgtcgccacaagtaaaataagccctcggctgctggggctgacgaccctaagaactctgaagcggtggtgcactgataggtgctggtggtgcactgaaggactactgatcagaatactgaatcggaggaccacgaccacctgaagcaccgtgaaaagcctgaagagccaactagaagggactaggaggatggcctctaccatatgaatccctaccaccagacgaggtaccactgaatctgcctgaatgatggggcctcttatctgacccctgaccaccttctgcgacagaaccatctcagctctgcgggccacattggccacctcctgaaaagtgatctcactcccggcctccttggccatctgaagatgaatcggctgaataagaccgtcgataaacctcctcaccctctctctctcggtaggaagtatgataagagcatggcgagctaagttgatgaacctggtcttatactgggtgaccgtcatggaactcgaactgcctccgataggcctctctctgagtaacggggagaaaattctccagaaacaatactgtaaactgctcctaagtcaaagatggcgacccagctggcctagctaagcaataatccctccaccaagtcttggcggatccagacaagcagaatgtagcaaaatcgacctcaacaatacccatgttcctaagaacctcgtgacagctatatagaaaatcctggggatcctcagaagaagcaccactgaaagtagtagtgaagagcttggtgaacctatccagcctccacaaagcatctacatacatagccgctccatcaccggtctgagatactacacccggttggactactccaactggccgaaccgctggagtctgaatctgaggagctacctgctctggagtgcgtatagtaggtgtctgagcccctcctccagcctgagaagtggctggggctacaggaagcaaacttgctcgggtgacactctccgttaggcccaccaatcggaccagagcatcctgaagaactagggtagcaataaacccctctgggacctgagctgggcccaccggaactgctggggccagaacctcattctcaaaattctcgggactaaactctgcccctacctcggcctctagcatggcctcggcctctagcacggcctcggcctctgcccctagtgcgagcttctgctgggggctcgggttgctgagcggtagataaggaagcgcgtgttcttgccatctgcgagagaacagagtagaaatccaattagcatttgaggaacaaatccgcacgacaagaaagaacaaatttgagattttcctaactctgtagcctctgggggataaatacaaacgtctccgtaccgatccctcagactctactgagcttgtctgtgagttgtgagacctatgtaacctagagctctgctaccaatttgtcacgacccggacttcccacccccgggagtcgtgatggcgcctactaatgctagctaggtaagccaatccttaacaacttacttcattaacaaatcacttcttttaacgacaatcagtgatagcatgaaaacaccagaatttagtaaatgtacggaagacttaaattaaagaaactgaacaataatacggaaatcaacatatgcctctacccaagaactggtgtcacattactccgaacttctaagagtactaaatacaaccgtttgaaagaaaaatataaattgtttgtctcgaatacatgtgataacagactgaaataaaaagagaggcgatgttgggcctgcgaacgcgtgcaagactacctcggtgtctcactggactgaatgctggctcccgtactactgcttctgtccaagacctggatctgtgcaaaagagcacaaagtgtagtatcagcaaaaccgaccccatgtgctggtaagtgtctagcctaaccccggtgaggtagtgacgaggctaggaccagactacaaataaacctatgtagttatatactatatggcagaaaagtaaacatgtaataagcaatcgaagctaggaaaggggaaacatgctccgggggtagcaaataaaacagaataccaaagaatagtaaggaaactacaatttaaacttctaacacggataaagagaaataaagcaactttcactttcagtttcatcttgttgcaggcgtgcaacccgatcccatttctcatatcttgtggtaggcgtaccacccgctcccatttcagtatatctcgtggttggcgtaccacccgctccaatttgattatatctcgtggcaggcgtaccacccgctcccatttcattatatctcgtggtaggcgtagcacccgctcccattttattatatctcgtggtaggcgtaccacccgctcccatttcattatatctcgtggtaggtgtaccacccgctcccgtttatatttaatcacacaatcacaagaaatcccggcaagggaacataaataatataataacttcccggcaagggatcacaacgatgttataattttctcggcaagggaacaacaatattgaattagtcatcgaggcaagggagaatcagctataaccaacctcaactcaacttgtactcagttcaattattgaaaatgctcaatcatagaagatcattaagtaaagcacccaagtgtcatttaagaacacaacaacttttaatttaagactcacggtcatgcttgacaccaacgtatagatactcgtcaccatgcctatacgtcgtactcaacaagaagcaagtagcaagtatgactcaactcctaatccctcaagctagggttagaccaaacacttacctcgatgccttgatcaccactcaagtctcaactatagctttaccctttgattccaccactaatccgctcgaatctagtcacaagttacttaattacattaataagtactaaatgaatcaaccccaatgcatgaaaatgagttctctaaagttttacccaaaagccagaaatcacccccggggctcacgtggtcgaaactcgagtttcagaccaaaacccgattacccattcccctacgaatccaaatatataatttgttttaaaatcggacctcaaattgaggtccaaatccccaattttagaaaacctaggttctacccaaaacacccaatttcacccatgaaaatctttgatttgaagttgaaatcatgttaaaagatgttaatgagtgaagaatataagttagaaatcacttaccaatgttttggataagaaaggttgtttgaaaactcgcctcttatgttttggggttttgaagaagtgaaaaaataactgaaattctcgttatttatacccctctcataccccagtgaggaccacaacaaatggaccgcggccgcatagcctccaccgcggaacgcacaaaggcaaccgcggccgcgctggcccctccgcggtcgtacgcgatttcttgcggaccgcactagagggttcagagactgcaacttcctgaacctgcaacatctgactttctaagcctaaggcatttcgaagctcgctcgaaactcacccgagccctcgaaactccaacccaagtatatacacagtctcaaaaatatcctacagacatattcgtgtactcaaatggccaaaataacatcacaagcatcgaattaaacctcgagatcaaaaaaaattctcaaaactcttttaaacgtcaaatttctcaattaaggttcggatcatatcaaacgacgttcgtttttaaccaaatttcacaggaatgactcaagtcatatataagacttgtaccgggcgccggaaccaaaataagggcccgatactattgctttctaatcagtttctcactttaaatttccttaaacaatttcacttagaaattcatttctcgggctaaggacctcaaattctgatttcgggcatacgcccaagttccatattttcctacggactctccgggaccgtcaaatcacgggtttgggttcgtttaccctaaatgttaaccgaaatcaaatttattcattttaaagtcaaaacttaatatttttcatagaatttcatatttaagatttccagctacgtgcccggactatgcacacaaatcgaagcaactctaaatgtggttttcaaggcctcagaagcacataatgggtaagaaaacaggtgatgaccatttgggtcgtcacatccacccaaaccctaattcatgcctataaataaggctacatatgttcttcaaagatagtccaacagttccataaactctcaaaatatgcataaagagatcaaatatacgatctccaaaatccccaaaaattcttggaatattcaataagagatcaaagacatgccaaatatgtcttgctcaaatttctatcaacattcaagatccaaacagattgctgctacatgcttcttgatcatcaaatacatcaaggagatgcataccattacgttcgagaaatacacttctaaggccctagaatcacgtagaataaatcggaggaaagaatcaagggataaacagagttgtaacctaaaatgtttatcaataaaatccttttttctttatagttgtttgtgattgcagttttatttttctctgcataaatttgttgcaaacaaattggcacgcatagtgggaccagctctgtcctccatctcttccttctgcaaatcgaatgtcgcgccccctttttccccttcatgggaaaaatccgggttctaacgttcatgggggtaataacttatttccttttgggaatttgggtattaaagagtcgccacctaacggattatagtgcgttagggcacctagagcgattaactcttggattggtttgcattactagagatttagggtaagggctcgagataacctagaagagaaggtgttaggcacccctcttagtccacaacggtgggtcccgcccgaacatatatttacgaacaagtccattaacagataaatagttttaaacacataattacaaataagagcaggttttagacattacatgactcaaataatgacacaaaggaaaggcttaaacaaattgtatacatatggaaagtaaaggtaatttgggaaggaggggtcctagtttggttagactacaggatcaccccatgtaatgtctggtaaacactcctcaatgaggggctacatatgacattagcgcgtagtcatcatatccctttctacccaagtccctccccttggtcatagcctaaacctctctagcaactttgacaatatcctatgcgtgcactacccgttccttcttcgtggccctggaggtattttaggacctctattctttagacagttctcgacttttctaagtttttaaaggataaaaatctaggcgtcaattaagaatagtttggactgcatttaaagaaataagttataggctcatagttacctcctcaaacataacaagtaagtgcacgtcttcaaagaacattcaaatacttaagagaaaaccctagcacatgatatctaggtgagcaggggttatatagcgttgaattaggacaatatgtgaaagatcctatttatcttgcctattgatttgaacttgttaaatttgaacagctttaagtagcaaaaaaatagttccagagttgcagaatttaaaacgccctataggcttgcctaaatgtagaatagtgatgtcttaagagcaagataactacgttgatgtagtaaatcagtgaacagttttaaacggacacttgagatcctataggcatgctttctagcagtagtgagttaaggcagtgttttaaaaactcaattaaagaagtggatagttgattaagccaatttcaaagtgaactaacatgaattagactgacttgtgtaactaaattgattttaattctataggcagaatttctgattttaattcatataggcatgttatctaattgttaagagctgatgttggaacttataggtatgattttagtgagacaaatgtaaacacatgtagtagaaggaattgaactcaatcactttacactctataagcatggtatctaattatgaagttgattttaaacctatagatatggtttctattattgaatccatttaaaccctatagacatgagttctaatatgggaaccttttaaaccatataggcatggtttctagtgtggtaaagcaaatatagcaagtctattaatataatcctataaatatggtatctacccgaattacccctgaaatatgtaactacccacgccttttcactaatcaccccaatgttatttgcaaataattattacagaccagctgaacaaataacataaacaaataaagaaggaaaagaagaagttaactatagggagcctgaagtaggcccaaatgacttcccaagcctccaatagcctcaagtgccaaagtaacatatacaatatcatatctaggtgtgtcaaagttccctaaggaactcaaggatcctgagcagtgctcacacctagacctttctcaacaataactgatttaagtgcagtgtggaaaggccagctctaacatgcaagagttcagagaaatctcatggatctcaaggcagtacacatgccagaggggcaggacctaaatattctagtagtggagagtgcttgacatagaaagagtttggaagatagagaaagaaggtcttaatagcagaaagaacttttatgaaagtcagaacaaagttttaagagtaggaatagtttaagaagacatttaaaataataagaaatcaggttaaagaatatacagcttcagaataaatctcacacaagggatagaggtatgggaacacctagcatacaccttagtggtgtcaatcaagtacagatatggtagttacaaagttaagttgggaacacataggtttaagacacaagcagaattacattagaacaaactgtaccggacaaacatttcatgaaaaacattcaatgtattagaacaagcagggtttggtcatgctaaacagtataaaatcataagcttgaaacatgctttgtaatatagtattctaggcatactgattgcatctaagtagaatagctcataaaactgaaaatcaagattgataaactatagtaacaaagtaaacacatagcttggaatgtgaatttaatcagaacataccagtttaggagagtatgcagaatacagagtaaagataatgccagtagtcagccttagtgtacaaccgactgaactagtaggaattgtaaggaacagaagagagtagatgctttttgagagtataatagtgtagacaaactagagtgccttgttatcgttgttataaactttaaagaagagaaggtttatataggagtcgaaaacttaacaaaatgagataagagattaattgagtagtaaatcagggaagttacccataaatcagcaagatcttcccttaatcaagggactattcaatcaacggtaaacatgccaggtatttaaggacaagaataaagtaaagtcttaggtataaaataggtaattaagggctaggtacataaagttctaattagggaaataattagtaagaatcaagtaataatgcagacaaggtaaggaaaaattaattaaggcaagcaaattaatcaaattgagtaaagaagcaagaatcaaacgtttaaagcaaagtagtcaaataaaactagaaactaagggatttagagtaattaacggttcagaaaatcgtgaaagaagcagcatgcttagcatataaaatgaggtaaggcatgaacagtcaggatttcacacagccttgacaaaacacatggttaaacgacactgattcaaagggaagcatacaaattttgcatgaatggctagtacacacacaagttcataatattagtgaaagtttgaacaatgaagattcaataaaagcatactaggacaagtaaatcatgagaagtcacaagaaactaaggcaagaacacactcagaagtacccatatcagaaacaaaatgaaaaccccaacattagggttttcagtataaacgggctagggttgcagcaattttataaaattagtcaaaaatgtgtgagaatcagaagtttaaacacaaagaatcatcaaacaaagttttaaaagaaatttcaaaaaccctaattttagaaaaggtgaagaaatcacttgaaatcaaacgattttggtagagaatctcaaagatattgtaagacacacaagaaatagactcaaatcgtcctagatctgtacagatctaggagatttagagaggaagttagggtttcgcagaaaaccatatagaggtgaagaaacatactgaaaaaaccatagatcgtggctaacatagaaagatttcactcgaaatcacaccggaatggccaagaacaggcaagagatgaacccaggatgcaagtcggcatggccctggtcccttgagggccttagggattgaaagaatgacatgagagaagccattagaggcctgagagatgatgagaggtcgccagagatagccatagataaggggtcggcgtttggagattagggtttaggttgagagtgttttgagagcaaagaggattttagggcggcggggtgggttgtaaaatgaattaggttggggagggaggggtattggtcggtttaattaggaaagggagaatctgggccgttgatcctttgggccattgatcaaaacaatcaatggccaggatttggccggtattgggtcgggtattttaatcaaaagttgggctaggtaatttagtgtccgatttgggatgaatagggattggggaggggttggaattgggctaaaattgaaatgcaatttggctagattttaaataaaattttaacactatatactttataataaataataaatgatttctgaaaaaaataatttcatgtattaaaatgattaaatagttgtttaatattttaaaaatataaaataccattttatgtattaaaaacgtagttatgctttaatagggctagtattgcaaatatatgcaaattgactttaaaaatgcaaatgcaattataaaaatgtactaaaaatattttaacaatattttggcataaatatagaatttagatggctaaatcaccacaaaaataatttgaaggatgattattggagatttttgactttgtttttatggtatttatgttatgttatggatttaatggtattttatgttgttttattatgagtctattgatagtactaatatagtgtctcttgttgcctctttgagccgagggtctcctggaaacagcctctctgccctcgggtagaggtaaggtctgtgtacatattaccctccccagaccccacttgtgggattacaccgggttgttgttgttgttgttgttgattattggagattttatcagtaaaaaggaaggaaataaatcaatttgaagattttaaaaattatagaaaaattataaaaatgcttatgcatgcttatatatgcatatatactattttgaaagtatatttatgtattaaaaaaatatatagggaaaaattcggtatcaacagctgcccctctttaccgaaaaggatgaaagagctttcgggtaaagaaataatagccaattttgaccggacgggatgttttgaaaaacagaggccggactccggtctttgatttgcctacatatccctaattttcaggaatcaggccatgtgtagttctagattcatcggcggaatatgccgatgaaattattgcaagaacggacacgagatgtggaagcagctatggtgagtggttagggttcgggacaattgaaggaactggagcgagatcgctcctactaggatagttgtttcttgctggttacctgcagataaaaatactacaaacctatatttgtgaaaatttaaacatgatgaagatttccttttagaccatgaaggttgtctttggacggttaaagatgatgtccttggaccatgatgtcctgggccatgaattgtttagcgagggattcacagtccatgaaatgatgttctcgggccatggcaatggtgcctccgaaccatgacgcctttgaataatgatatgcaaatttgagggatacttaggccatggcatgaggatgatgccttttagactatgacgcctttggatagattgacgatatttagcccatgatatgcaatagtcatgatgttaacaagacaaggcttagtcttgggaaatggagggcagagcttagcccgattgaaaagcaaataaatagtactagaaatagagcaatattcgtgcaaagagggacaatgcttagtcccatacagatggggaagcaaggattagcctcatgcagatggaggcagggaatatcctcatgtagagagggaggcaaggattagcctcatgcaaatatggaggcaaggattagccccatgcaggtgtggaggcagggattagcctcatgcagatatgaaggcagggattagcctcatgcaaatagggaggaaaggattagcctcatgaaaatatggaggtagggatcagcctcatgcaaatatggagtcaaggattagcctcatgcagatatggaggtagagattagcctcatgcagatatggaggtagggatttgactcatgcaaatgtggaggcaaggattagcctcatgcaaatagggaagcaaggattagcctcatgcaagtggggagacaaagattagcctcatgcaagatagggaggcagggattagcctcatacacgtatggaggcaaggattagcctcatgcagatatggaggcaggaattagcctcatgcaaatatggaggcaaagattatcctcatgcaagtgtggaggaaaggattagcctcatactaatagggaggcagggattagcctcatgcaagtatggaggcaaggattagcctcatgtagagagcaagtagcaaataagagtagtgtatgtcttagctggagatacattcggtgtctgatgtcttgattgataatgaatttgttacgtgtatgtatttgaggatgttattgccatgctagatatgcctgcattcaaagaaaaattgtaagttttgtgggggaaggttggtttgtgcttctgtcggctggctttgctttgctctatcctgaaagccctttctgagttcccctaggtaacacctgactgttatggaaatagagtttttcgaaaaatattcaatcgttcataaaaatagagttatttcagaaatatattgatatatttagatgaactagtgactgtaacacatctcaaatgcattacaactctcttctattggaattttgagggtccttctcaaaattctgccccagtttagtagatgatccttcggctgtttgcggacaataggccttgctgaaccttcttcggaattttgagaatccttctcaaaaattttgccccagtttcttaactaattattgaccgtctgacacatgtttgcattggctggacttgctccggaattttgaggaccctcttcaaaattctaccacagtttctgatcttggggggaaatgaaaattttattatgatatgatcgaacccataaggctgcctacgtatcccctcttaaatggaaatcaggtcaaacgtagttcaattacattagatgagaaaaatgtaaataatccaagcatcgtatctcttgattgcgtctgaattaattggttttggccaaattgctccatcaatttttgcaagtatgggtgctcctcctgtcagcaccctgtgaaccatatacgaaccttgccagttgagggagaatttcccttttgattcatcttaatgtgggaagatcttctgcagcaccaactgacctggtgtaaattgccttagtttgaccctttagttgaaagctctggacattatgttctgataaatttggccttggcacactgcattcatcctctttccatcgatgaaggccaattgttcatagcgacttcttatctattctgcatcgctgagttcagcttcctatatgactctcaaagaagcaatctctacttcggctgggatgacaacttcggtaccgtaaactagcatgtaggaagttgccctggttaatgtgcgaaccatagtgcgatatcccaataaagcaaatggtagcttttcgtgccactatttgtgattctctaccatcttccttagtatcttcttgatgtttttgttggccgcttctacggctctattcatctgaggtttgtaggttgtggaattcttgtgcttgattttgaaagtttcacccatggcttttatcagatcactattgaggttggcggcattattagtaagaatggactcgggaactcctaatcgacaaacaattcgatccttgacaaaatctacgatgactcttttggttacagctttgtaagatgcaacctctacccattttgtgaagtaatcaatggctactagaataaacctgtgttcgtgtgaagcagtgggctaaatcggaccaataacatccattccccaagcggcgaatggctaatgagagcttgttacattgagctcgtttggcggcacttttatcatatcggcatgcacctggtattgaaagcatttgcggacatactggatgcaatccgtttccatggtcatccaaaagtaaccgaccctaagtatcttcttagccaagacgaaaccattcatgtgcaggccacaagtcccggcatgtacatcctcaagtagcttagaagcttcctttgcatcgacacatcttaggaaacccaaatcaggagttctcctgtacaaatttcctccgccgtggaagaagtgattgtaaaatctctggagtgtgcatttctgagtgtggtttgcgtgctcaagatattctccctttgacaaatacttcttgatgtcatggaaccaaggctttccatctatttcttcttcaacatgagcgcaatatgccgactgattatggatcttcactgggatgggatcaatataatttttatatggatgttgtatcatagatgacaaggtggctactgcatcgacaaactcattctgaattctgggcacatgtcgaaattctatcttcatgaacctctttcttaattcctgcacatggtgcagatatggcaatatcttggaattcttggtggcccactctccttgtacctggtgcataagcaaatctgaatcatcgatcactagcaactcttgaatgttcaagtcgatttccatgtttagccctagtatgcaagtttcatactctgccatgttgttcgtgcagggaaatttgagtttagcagatactggataatgttcacccatttctgataccaaaactgctccaatgcttactcctctaaaatttgcatctccatcaaagaacatcctccaaccgtcgtatgcttcagtaatgtcttctcccacaaatgatacttcttcatcaggaaaatacatcttcaaaggttcgtatgctcctcccaccggatttttagcaaggtgatctgccaatgcttgccctttgaccgccttttgagttacgtagacgatatcgaactcacttaacagtatctgtcatttggccaactttccaatcggcatgggtttctagaatatgtacttcagagggtctatcttagatatgaggtatgtagtgtaggcacagaagtaatgcctcaatttctgagctgtccaggtcaaagcacagaaagtgctttcaagtaaagagtaccgtgcttcataaggtgtgaacttcttactcaggtaatatatggcttgctcctttcttattgtctcgtcatgttgtcctagaacacatccgaaggctccatccaatacagatagatagagtagcaaaggtcgtcctggttctggcgggaccataattggtggtgtggacaggtactccttaatcttgtcaaatgctttctcacaatcctttgtctagcttgtttcggcatcttttctcagcatcttaaagatgggttcacatatgattgtggattgtgatatgaatcgattgatgtagttgagacgtcctacgaagctcattacgtcctttttgctcttaggcggtggtaactcctgaatagccttgaccttagatggatccagctcgatccctcgaggactaacgatgaatcccaataattttcctacgagaaccccgaatgcacactttgcgggattcagtttcaaattgtacctctttagactgccaaagaactttctcaggtccgctatgtgatctgcgaccctatcggatttgataatgacatcatccacatacacctctatttccttgtgtattatatcatggaagatggttgtcatggctctcatgtaagtagccccaacatttttcagaccgaatggcatcatcttgtaacagtatacacccaaaggcataataaaagttgtcttctctgcatcttctttgtgcatccagatctggtgatagcccgcgaaacaatatacaaaggattggagttcatgcttggcacaattatcgatcaggatgtgtatgtttggtagtgggaagtcatccttgagacttgctctgtttaaatcccgatagtcaacacatactctgaccttcccatccttcttcggaataggcacaatgttagctaaccaagttgggtacttaaccaccctgagaactttggctttgatatacttggtaacttccttattgattttcaggctcgtgtctagtttgaactttctgagtttctgctttactggcggacatatgagattagtaggcatcccgtgagtcactatggacgtgctcaaaccagtcatgtcatcatatgaccatgcaaaaatatcctcatactcttttaggaagcaagtgtactcttccttctctgttgttgacagtgaatgctgatgcgagtctccttgacggtcttggcgtctcccaaatttactgctttggtttcatccagattggacttaggcttattctcaaaattttcaacctccctgataatttcctcgggtatctcatcctcttcgtctgaatcactatcctcatgttgcatttcctcattacatgtcacagtcacgggttcatcagaaaaagtaataataatgctgtagaaatgaaagtataaaatagtaatgaataataaagagcaaaagagtttgattaaaactgataaatcatcttgacaagtacggctcgatgaatcaggcatttatttcgaaacaagtaaatcttaaaacaaaattacaggaaatcttagatgcctagaatggctatagaagtaaaaatttgccaagctacccagggactcagcgggctcgagatggtgtggcagtccagttcctgagagcggctcccttctttacagtttgaatggtgaggccttcttcctcctcctcctcctcaattatgcactgcagtctatgtcctcatcctccaagaacaaattcttcaacccagcgagcgcttcctcttctgtagtcccccatatcgtattagcttgatgaaaagcttgttccaaatgtgacactagttgctcgagagggtagtacggtccatgccattaaggcgaccaatttctatgctcctgccatgtgtactagtatccaagcccaaaggtggtaccatgatttttcagctatattggtttggtgataccttagaggttctttcccaatcctttgccgggttcatatccagactaggccaatatgctttctattttactgctccaccatttatccttgtcgatggcattgacccgttcaatgtgatgatatgtttccccttctagccttcttttatgtccaatagccgggatggtttgactagtgtaaatgggctactcccgtcgccgtgaatgatcacctcctgacgattccattttaatttcatagcttgatgcagttaggaaggcacggcatcagaggcatggatccatggtcggcccgacagaagattatatgaggctggtatgtcaagcacctgaaactcgacgtcgaaccgagttggccccatctgcaagcaaagtttgatttccccgatcgtggccctttggaacccatcgaaagctttcacgttcatgcttcctacccgtatttcatggaaacctttgtccaaccttttcagagtgtccaatggacaaatatttagtcttgaacctccgtcaaccaagaccctgtcaatgaatttgtcttcaattacactgtaatgtgcaatgccgattgtgatttagcccctcaggtggtagctcatcttcgtggaagataatcttataactttccaatacttgccccaccatgttggccatttctccgccagtgatgttattgggtacataagcctcactcagcactttcattaaagtgttcttacgtgcctctgaattttatgatagtgacaggatagatatctgagctggggttttgttcagatggtcgacgatggaatacttctttgcttgtactttcctccacaggtcattcggcccgatctcaatgataggctacctagtattggtatccttacttgaacctcccaaatgttcaggcatatagccccttccagtcctagtcttcccttgtgcatcatcagattcttctacgttggcgttccctttttgctgagcctcgacaacataatcccagggtattgcttttgattttaatggaggtgtggttgatactgtcatagtaaaaggtgggaccacttctacctcaaagggagcaggggtggccacatgtaaagccacctctacctcaaatggaactgatgcatttatctcaaccttgattggtgactgagtctgtaccacaataggagtaagtgtgactgcaactttaaagtcatagccttctcgaataaacccaatcgatccctcagggtcccattcttcattcgtctttatcacatgtacttcaccgcatctatgatcagggagggggttgtcgcggacattaggtgtgtcttcctttgcgtgtatgaccttgttgccaatcagtgtctggatcttatccttcaatgttcggcacccagcagtggtgtgtcccttcataccagaatggtacgaacaagttttgttcagattgacccattgggatgggttttctaatgccacagtgggaacagaagtggcataacccacagcttgcaacctttcatacaacaggtcgataggctcaacaatggcggtgtaatgtatgggtggcttgcgatcgaaattaggtcttggtctcgaaaagttttggcgagttggaggtgattataaatgggatggttgggagttataagtatggtggaaagtggccgattaggaatatttgggagataagggttgacatgtgggtggcggtgcttggtacgtgggtagaggtgtttaatatgtaagtggagatttcgggccttgggccaccattactgccccaacatttctcttctttgatatgctgcctgattgtaatgccttctttgagggcctgtagcacctcaaaattcattaccatcccactcttgattccttcttcgattctttctccgagtttgatgatatcagagaatttatgatttttgataaccatcaatctttcataatattgcggatcctatgctctaatgaagaatttgttcatctgttcctcgtccaaagctggaactctaacgagtagcatactcacggaaagtctcagtaggtttcttcttaagattctggatgtagaaaacatctggtgcattatctgtattgaacctaaaccgatccatgaaatctgacgccatacttacccaactggatcatttcttgggatcttggctaatgtaccaggacaaacaatccccagtaagactcctcataaagagattcattcggatctttttgtctttccccaccccgacaagtttgtcgcaataagtcctcagatgaactatgggatcacctgtatcgtcaaacatctcaaacttgggaggtttgtatccctctggcagttctacattcggttgtatgcataggtcttcataattcaaaccttctattcctttgccgccttcgacaccttgaactcagcttgtcaacttcttgagttcttcagccatgtttttaatgagcaggtccttttcggaggattctggtgtataagacatgggttggatggagtgaggtacaatttctacgtatatagggttgctttgatgggtgccaggaacttaggcgtagtgatggtcgttggtggagttttggggatggggaatgggttgtggtgtgttttggggagtgtggtaagtggtggttggtgggtactgagttggctgatggtgatgttgtggcggagtcaatattggcaatggattgagattttggggtggagttgcatattgatttggtgcgggaggattttgtggatgttggttttgtgtgttttggggaggtattgggttctttgtgttctgttggttgatgtcggggacattcaaggtgagtgacaagtttgccaagttgtgaacctactcaagttctccttgcaattccaatatcttttattccaatctcaggactagataatttggggctggagtactacggccatctgaggtttctgcgttctcaacattctcctttcggataccacttaagtcgtccatttttgctttccctctaccctttgtattgcttggaggaggaggaggtggagggcctctagatctagtatgatatgctgatgaggccagtatgagtgaaccaacctaaggagatgggaataattaaaaaaaatatgcaaaaacaaaaaggtaacaagttagtgaggattctgaaatgtttgtagtatttaaacacatattgtggaaatgtaaattcgtgtcctactttggaaacctcattgtgcccgaggtaggcctagtgataaataaatttggagaactttaaatgccaataaatgcttcatttaataatataataatagatgaatcccaaatcgacactaagataataaaaaataagtcactattggcacttggccttattacattttaggaaaatagataaatctagcctatttggtcatagaaggaccttccccagattcaatcttcctgactccatcatatatatcccccagctcgcgcagacccagcagcaagtaggctctgtccagatgttctccttcagcgttctgacaatcctcgattctctttatcactttgcctttcagctctactattcctcgctccacatccagtttcctgttggaagtggctgccatctctttccattcttcaatcatcgtacatttctctcatgtatttcccagtgctcattctcagagtcgtggaccctcttgcgcagcctgttgtatttgacttgagcctcagcttcttcgtttatgatcctattccctcgaccagttcctagcatcaccatccccttcagattgtcctccaaccatgtcgggtagagaggctcacaccccacatgatacctgtctggctcaatgtgttcttttccacaatgattttacaatgccacacgtgctgagcttggcacttataagggacatcgttgttttgaaagtctgccctgaaatgactcatattggcaacccttggtacaacctgtttcctgcctgcttgtcttatacctcggatagggatataagggtatatccctctcaacccgatcagcaccaagtgtggagcgtttctggatctgatgatgaattcgtctgttgggaactattctaacatccattgcacatattcatcagtcagattgtcgaagaactctacccattatttggcactttttggctgagcaaatctgtctggaatgtaagtcatccgcttggggtgatgaaaggcaatatggtcgttccaagcccttcgcgaaaattcttggcagtagtgacccttttgaaaatgttctaacaaccacaattgcagcaacaagttaaaaccctcgaaatgtttggccccttttggcagcactccagagccctgtagatgtcagctatgatcatggggactttagtgtatgtctatctattgatcccttccctcaaaatcttggcaaccatggccaacctagtgtggattctttcccttttcattgggaacactatcaggcccaagaagcatacgatgaacacgaacactctgcggtggatgtggcccagataagtgagagagaactcatcatggtaggtacggtaggacttgctatggccatacctctcatacaaagggtatgtaatattctttcaggcataccaggttagcattattctttaaccccatcatttttaagaaccttttaccggtatggttctccggtaccaataacccgggactatcccaagtcaacccgcaagccctccaatttcttctagaagtggtatcatttctacgttgcgaaaactgaacacagacctctcactgtcccagagcaaagtagtagcctcgatcaacttgttgtttggctcaatgtctagcagggaaggcaagttacccaggtacttccttacatgtttcttgtcacttgaggaaaggtcctctaccaatctagcagcaatggtggaatgttgctaaccatacccaatctggggaccccgtacctcattttctgcaaaacaaaagggttaggcctttatcccccaccagactcgactatttatacattcatgattagcatattggtatttagtttgccaaattaatgcacagatcgtggttgtgtccgttgggattatggaacctccggtggactttggataagtctcttcttaaaggatcattatgtggataacataattgctccgacttggtttgaccataatgcatgcacaattttgatcagagtaaggtaactatggggttttatacttgtaccctcaaacggacaacttgagggggaaacacgcgaaaccgtcgactgcaccgctgatcgattggttttatcacaaataagcctttccgtattcaagggtaataaataggaagagcgcaaccactcattaagcgtcactataggatttgatacgtacgagtggaatatgatgtggagcataatttattcaccaattaatagcataaagtcatgtatttgaacgtaggaaaaataaatacaatatttaaataattgaaaagacagttacagaaaaaagaaaacaaaaagacaagtcagttttaggaataaagaaacataaatgcttaaaataggcaattaaatttaaataaggggaaaaggcttaggatagagcatgcttggactaattcataaaaataggttcgttatggtaagagtctaagatattcccagcagagtcgccatgctgtcgcgctcctttttttcccttcgctggaaaagtccaggttccgacgttcatgaaggtaatgacttatttccttttgggaatttgggtactgaagagtcgccacctaaaggattacggtgcgttaagtcacccagagtgattaactcttggattggtttgcattaccagagatttagggtaagggcttgagataacctagaggggaaggtgttagacacccctcttggtccacaacgatgggtcccagccgaacttatatttacgaactagtccattaacaaataaatagttttaaacacataattacaaataagagcatgtttttggacattacatgactcaaataatgaaacaaaggaaaggcttaaacaaattgtatacatatggaaagtaaagggaatttgggaaggaggggtcctaggttggttagcctacaagatcaacccacacaatgtccgataaatactcctcaatgaggagctacacgtgacattagcgtgtagtcatcatatccctttctacccaagtccctccccttggtcatagcctaaagcgttctagcaactttgacaatgtcctatccgtgcactacccattccttcttcgtagccctggaggtattttaggacctctattctttggacaattctagactttcctaaggttttaaaggataaataagtgcacgtcttcaaacaacattcaaatacataagagaaaaccctagaacatgatatctaggtaagcaggggttatatagcgttgaattaggacaatatgtgaaagaccctatttaacttgcctactgatttgaacctgttaaatctgaatagctttaagtagcaaaaaaatagttttagagttgcagaatttaaaacgccctataggcttgcctaaacgcagaacagtgatgtcctaagagcatgataactacgttgatgtagtaaatcagtgaacagttttaaaaggacacttgatatcctataggcatgctttctagcagtagtgagtgaaggaagtgttttaaaaactcaattaaagaagtggatagttgattaaaacaattttaaagtgaactaacatgaattagactgacttgtgtaactaaattgattttaattctataggcagaatttctgatttatttccaataggcatcgtatctaattgttaagagctgatgttggaacttataggcatgattttagtgagacaaatataagcacatgcagtaccaggaattgaactcaatcactttacactatataggcatggtatctgattatgaagttgattttaaacctatagacatggattctattattgaatccatttaaaccctatagacatgagttctaatatgggaaccttttcaaccctataggcatggtttctagtgtggtaaagcaaacatagcaagtatattaatataatcctataaatatggtatctacacgaatcaccccataaatatgtaactacccaccccttttcagtaatcaccccaatgttgtttacaaataattattacagacaagctgaacaaattacataaaagaactagagttccttgttatcgttgttataatagtgtaatagtgtagatgaactagagtgccttgttatcattgttatgaacttaaaagaagagaaggtttatataggagtcgaaaacttaacaaaatgaggcaagagatcaattgagtagaaaatcagggaagttacccataaatcagcaagatcttcccttaatcgagggacagttcaatcaacggtaaacatgccaggtatttaagaaaaagaataaagtaaagccttaggtatagaataggtaattaacggctaggtacataaagttctaattagggaaataatcagtaagaatcaagtaataatgcagacaaggtaagggaaaattaattaaggcaagcaaatcaatcaaattgagtaaataagcaagaatcacacgtttgaaggaaagtaatcaaattaaaccagaaaataagggattcagagtaatcaaaggttcagaaaatcgtgaaagaagcagtatgcttagcatataaaatgaggtaaggcatgaacagtcaggatttcacacagcctcgacaaaacccatggttaaacgacactgattcaaagagaagcatacaaattttgcatgaatggctagtacacacacaagttcataatatcagtgaaagtttgaacaaagaagattcaatagaatcatactaggacaagcaaatcatgaaaagtcacaagaaactaaggcaagaacatagtcagaagtacccatatcagaaacaaaatgaaaaaccaccaacattagggtttttagtacaaacgggatagggttacaacaagtttataaaattagtcaaaaatgtgtgagaatcagaagtttaaacacaaagaatcatcaaacaaagttttaaaagaagtttcgaaaaccctaattttagaaaaggtgaagaaatcacttgaagtcaaatgattctggtagataatctcaaggatattgtaaaacacacaagaaacagactcaaatcgtcctagatctgcagatctaggaggtttagagacaaagttagggttttgtagaaaaccatacagaggtgaagaaacatactgaaaacccttagatcgtggctaacatagaacgatttcactcgaaatcacatcggaatggccaagatcaggcaagagatgaaccctagatgcaagtcgacatggctctggtcccttgagggccttagggatggcaagaatgacatgagagaagatgagaggttgccggagatggccatagatggagggtcggcatttggagattagggtttaggttgagagtgttttgagagcatagaggattttagtgcggcggggtgggttgtaaaatgaattaggtttgggggggggggggtattgatcgattttattaggaaagggaaaatctggaccgttgatcaaaacgatcaatgaccaggatttggccggtattgggtcgggtattttaatcaaaaattgggctgggtaatttggggtccggtttgggctgaattgggattagggaggggttggaatttggctaaaattgaaatgcaattaggctagattttaaatagccattttaacactacataatttataataaataataaatgatttctaaaaaaataatttcgtgtattaaaatgatttaaaatataaaagaccattttatgtattaaaaacataattatgctttaataaggctaaaaatattctaataatattttggcataaatatagaatttagatggctaaatcaccataaaaataatttgaaggatgattattggagattttatgagtagaaagggaggaaataaatcaatttgaagcctttaaaaattatagaaaaattataaaaatgcttatgcatgctgatcgtggcctactccgcactactaattatttagcgagagagggtcaagatcgatatccacagagagctagaattggaattgagtgtctatttagcctatgattgcttagcgttccaaattgcacttctcataatttttagggttttcttttataattctacttttaacaaactacaaattgtaacttaagctaagagttaaatgctatgggttgttcaaatattctaaaagctttagggtagtggcatccacctaggtggtcaattgacgggtacttgaaactaaggctctattgacattattggggagtatgatataagagttgcactgctttacccactctacacctctcggtggctcaagtgattttgcccaattggctttctcaataccaatgggtatgcaaatttgctcaagcaacttagggttcaagtcgggtattactctctcgaagtttaaccctttaattgggactatcaattctcttgagtccatcccaattccttgttggatcaatttcggagacttaggcactctttttcaagaagagcccaagtcaaattagcacaaactagtgtttgcaaccactaattcagtaattaaaccatgaaattgatccaaataacaaacatccatactcaatatagccgtaaattgcaacactcatcaattgcccacactagggttgagccacaaccctagctaatgggtctagccactcatacttgaagagaaaaacagagaaatagatgaagatgagcacatattaattaattgctaagctaaataaaaagattcaatgataaaaagtaagtaaaaatgcccaaaatggctacaagatacgttcccatgagcgcaacaactattctaaaatgcatgatcccctataaatggaaaaaggatctatttatactaagctaaaaaatttggacaaaaatgccctgcggggttagtgcggaccgcacaaaatggtgtgcagcctcattaagctcttgaacttgaaaacttgactctctgaactcaggctctgcggatcgcacaaaatggacatcggccgcggaggcttctagtgcgttccacacaaattggactgcaaaccgcacaggtttgaaagctgcaactttaccctctctgaatcttggctctacggaccgcacagaatggtagtgcggactgcacaaaaccttctgcggccgcactgccttaatgcctgaaataccagctctctgaatctccctagtgcagaccgcacaaagtgtagtgcggccacactaggcctgtttttcctgagtttgtcttgtctttggtacttgtgcaagtttcactcctttcgagccgatatttgacatcttgtcactttgttgatcaaacctgcaatcaagcacaacttatgagcctttttggactattttgtgtgaatttataatcaaagcgtaagcaagaaggagtataaaatgcgtcaaaatccctagttatcaactcccccaaacttaagcttttgcttatcctcaagcaaataacataagacccaccccttaagggaaaattcaagaaattttcagctgtcctaaagcaacctcaattaacatcaattgggactaacaattgtcttcaacacacataagtcataaacaactttaacctttgaaaaaccatggatcaagtgtgacacaagagcatcaagagttgactcaacacatcaaagaacacttttcacttaccttggtcattgtggaacccaaactcacacatcctcaactctccctaagccaaacttacctttagaatagtggcatgcaaaacgaggttaatggaaattcaatcttctctctcaagaaaaagtcacaagttcggctctaaataccatatgctttccccttatgtgagtatccactaatgtaagctttattcaactcaacatcatataaggcttttttggagacattatgaaggcttttggttcagggtaggacatgttttggtcgaagtaggttccatcttcccttaagcacttcttttgattcatttggcgtaatttacttgactctttgagtcatttcacttctttctaaggggttagagagacacactgtcactctttcttatgtctttcagaccttttctccttttttagctttccacacctttcattctttgcttttcttgaatccctttttattctttttcagattgaacattctttttgtctttttgcttttctttatttttcattgcctttccttttcttcattttctttgtgactttttaccactttgttgccatccttgtctctccccccaaatttatactttttccatgtgctaaaggaaaggttgggtgccaagagagggtatctttttagaacgggtataggcttgtatcatggttcttgaaagaaaaaagtctaagactcaaaagggttgactagggatcttatcattggtaggctatggaattgttcgagatatcatttggatcaaggagagtctataatcatgtctcaagtcaaaatgcacttaggattttgcctcaaaaacatttagggaaagttctagaccaatggctcggtacttggatatgcaattcatttactcaccacacaagctaagggaacattaaagacatagagttaggggcctacaatgaccttagatacgatttgagcaaacaatgatcccgaaaaccacttgataattatcggtcaacgcaagagtctcaaggtcacacctttcaccatcctaaacacaacaatttgtttttgaccataagatcaagggaaaatgtgctaggcccaagtgaagctttgcttgaggcacccttaactactcactactaaaaccagaaagaaaaacagactcaaacccttaagaaggttgtcatgccatccatcactgggaagtgccacccggttcatacaacactccacctttggaaagaaccgtggtattaagaaaaccaaaggcttattggaaatgtccaaaacaaaacaaaaagctacgaacataaataagaagctaagaatgaaaaatttgcggaaaatagaatgaatatatacaagaggggatttaaatatacattagatgggatgaatatgtacaatgaaacgtaactttatatacagaactaaagtaaaataaaagtgtgataaatgtaacgaaatatcagaattatatacagaccaaagatgaaaaatcaagaaagcataaaaatgtatcaaatatatatgtacaatcatccaaaatgtaaaatgtagggcctaagccctcaaatgaaagctggcattgtccccaatgccaactagtctaaataaaacatcaaaaagataagaggaaaaaaggaaaaaggatgtagaagcctccctaagccctgcttgtctgcataggattatgagtggtccctggttcctctgtgtgctcgggaccctcagactggttcccagtggcttgctgctctactactgggacctagacaggctctggacctagtacatcctgtggctgattggaagaggtctcctgtgggtctgccaactggatgactgcatcgagcaataagtccaaaggcagctgatcttccttcaatcggtcaacatcaaccctcaatgctttcacggactccttggaagctcgtgtcttccgcagcttctttgctcccaagcaagctccttgagagccttgctatgtgaatcatatacctttgagagcacaacctgagtgtcaaggatcttcttctgattgtctaaaatctctttcaaagcatcctctatcaactaggaaacctgtagggctggaggtgccgactgagcctctaccgtggtagtctagatggacaacttagatgaggcagtcttcatccagttgttgaaatttagaagtgcctggcttagacggtgggtagtaatatgatgggcccagtaagatgggatctccgggcccgctgatgtggatagaccagcaggaatagctgtggatgtggaaggtccgggagagatgtcagcaggagtagaggtaggctcagcagggacctctaccataactggatctttagactggacaattggggcagaagcatgagctttgtagttcttgctcttggggttgttatcccccttcatgctataccaggaaaatggggctatctccttgaccttgatgtcatagggcctctcatccactttcaggtcccggaagtactcagtcaggaagctggggaatggattgtttctatcatgctcggcacccacaatagtaataatcctcgacatcacattccccatattgatggggtaccccaccataatagaagtgaccaatacagcccgatggagaggaaaggcgttgtcatgagtggtagggtccaaccggctgcaaacaaaagtctctcatcccctcgcttcaaagttcaggctctttctcaatattttgattccagcagccaaccagtcagggacggtacgtgggattgccaagtactgtgctagccatggacaaacctcctctcccatttccaaatttgccatgtataaggtctcgtcctctcattgaagctcaggtattcatttatatacttcccatcaaacaacaccttccaattttgaaccttggtcactttggagccctttttgatgtgggctacattgctgtaaaattctttgaccaagtgttcgttggaatcctcacacttatcaaggaaatggtcccagccaactctcatcctaaactgtctcctcatgttggggttgtgaggtagcaagtcactatcaatgaaactccgctccgggatcaactttctcaccggccaccactcctagaatttatggtatgccacttcactaacaaacctatcttgccaaacctcggctttctagttctcacaatccccccccccccacacttgtggttcacctccttcttctacttcatcgtcaccacctacttcttcctcatctcctacaacaccctcttcagataatgaagctgtgggagtggtagagtattcatccctactacccgctggtgagccctcagacgacctagaagaaatgttcactgatgcttgggctgcggggaaaggggaagagtgtctctatgtctggccctctacggatacgagatgtattctgggattgagtccaaagagatatcccgagatggctcgtactcactccccgaaatgtcaatgtctttgtcagccacttttatggccttccttatgttcttgatgttttgcctagcttggggagtgagtttgaccattttctgtttccctcccagggaggattctcctcggcctggttgtttagagcctttcccttgttgtttcaccattgtctgcatacacaattcagttgaacttgttagaatcaatttcattagttgaaagcagtgtttcaacaagaaagcagaaagttgtagaaaatacctagtgcggaccgcacaaaatggagtgctgccgcacaagggccagtgtggaccgcacaaaatggccatgcgatccgcacatgggtggggttcagaatacccaccctctgtatcttgacagtacagactacacaaaatgtagtgtggccacacaggggctagtgcggaccgcacaaaatgtagtgcggccgcactgcccaatgttcagcttcccagaagttctttagtgtggtccgcacaaaatggtaccgcggaacgcactagggaatcgcagaccgcacaaaacgaccacggtccgcactgagtgcccaggtttggcattgagttagggttcgttggatttttgcttttaagtccaaattttcacctaatgagtgcccccaagtcatttcccagtccattaaactaacaaagtcctcatgaattcaaaatttaactactctagtctaggcaattgaaataaatacgggagggagaagaacagaagctaagaaaaataaaaattaaatgaaattgcaaaattaaacaaggaaagggaagattttgttaccagattatgagatgaagtgaaacgaatcaatgccaagcaagtaattacgatcaaatgcaagggatgaacaatattagtatgctttgagagttaaaattttgaaaagggtaacaagagaccctcaaggtctatttatagagaagccactggggcccagtctcacctactagtgtagactgcacaaaatggaccgcagtccgtactgaactgttttgttcaagtttgataaggcaacactctgcggtccgcacaaaatggactgcggctgcagaggtccaccgcagaccgcacaaaatgtagtgcggccgcggtggcaaactttatagaggcttcattttacccacaccagtgcggtccgcacaaaatgtactgcggccgcactggaaacttcagagacctgtgcatttttttcactatgtcttgcactgcattaacacaaccctgtaacatctcataaccagttagcccaaaaatcaatcctatacttcaaagaaaatcaaagaaagcaagaagaaaagcacttgggttgcctcctaagaagcgcctgatttaacgtcgcggcacgacgcaggttaccatcacatcatttgaaatgaagaagtgccaccacgtggctgtcatcaattttcccaatataatgctttacccgatgcccgttaactctgaaaacttcactatttttatttttcaaatcaagagcaccaaaagaggtcacaaacacaacttcaaacggcccaccccattttgatttaagttttcccgaaaacagacgtaaccgagagttgaacaagagaaccaaattatctactttgaactcctttccacaagcatatttatcatgaaggtacttcatcttgtccttatacaaggatgaaatggagtaggcatggaatctaaattcatcaagttcattgagctgctctacaggaagattggctgcaatatcccattcaagattcaacttcctcaaagcccatatggtcttgtgctctaactcaatcggaagatggcaactttcccaaacaccaaccgatacggagatgtaccaatcagagtcttgaaagctgtcatataagcccatagagcgtcatccaacttcttcgaccaatcggtcctattagcattgaccatctttgacaatatacttttgatttccctgttggagacttccacttgaccacttgcttgaggatgatagcggtaaaaactttatgattgacaccgtacttagaaagcaacgtgttgaaagctctattgcaaaaatgagacccccatcacttatgattgcacgaggagtaccaaacctcgtaaaaatgcttttcttgagaaatgaaacaacactctgggcctcattgttgggtaaagccacgactttaacccactttgaaacatagtccaccaccacaagaatgtaagtgttcccacaagagctaacaaatgggcccatgaaatcaatgccccatacataaaaaatatcaacctctaggatggtattgagagtcatctcatctttcttcgaaattccagccgctctttggcactcgtcgcatcttttcacaaaatcacctgcatctttgaataaggttggccaatagaatcctcaactaagaactttagaggcggtcctcaccccaccatgatggccaccatagggtgaagaatgacaagcctccaagttactcaattgctcttcctccgggacacacctttggatcacaccatccgtgcaaatcttgaaaaagtatggctcatcccaataaaaatccaaactatccctattgagcttcttcctttggttagaagagagctcacacagaattattccggtcacaaggtaattagcaatatcggcaaaccatgacatatcattcattgacatcgcaaggagttgttcgttgggaaatgaatgattgatctcaaggccatcacaaggcctcacctcctcctccaaatgggacaagtggtctgccacttggttctcactacctttccgatccacaatttctagatcaaactctgtaagtagtagcacccgtcgcattaatcttgacttggagtctttcttcgtcgtcaagtacctaagagcgtcatgatcggtgtgcactatgactttggcacccataagatacggccgaaacttttccattgcaaacactatagccaacaactcttcttgataactgtgtagttcttttgagcctcattcatggtcttgcttgcgtagaacaccagatgaaatattttattaaccttttgacccaaaacagccccaactacaatgtcgattgtgtcacacatgagctcgaaaggcaagctccaatttggtgcggtaatgataggagtagtggtcaacataagcttgagaagctcgaatgcttgcatacatccctcattgaacacaaacttagcatccttttctagtagcttgcacaaggggtttaccacattcgaaaaatcttttataaacctccgataaaaccccgcgtgcccaaataaactcctcacccctttgacagaagtggggggaggaagccttgaaataacctctatcttggctttgttaacttcaatcccacgctttgaaattttatggcccagcactatgccctcctctaccatgaagtggcatttttcccaatcaagcacgagattggtgtcttcacatcgggttaatactctatctaattttttcaaatactattcaaagaaattaccaaccacactgaaatcatccatgaagacctccaagatatcttccaccatgtcagtgaaaatagccatcatgcatcgttggaaggtcatcagagcattacacaacccgaacgacatccgagagaaagcgaaggttccatacggataggtaaaaatggtcttctcctagtcctccggggcaattaaaatttgattataccccgagtatccatccaaaaggtaataaaagctctccccgcaagacgatcaaacatttggtcaaggaatggcaataggaaatgatacttttgggtcaccttgtttagcttctggtactccatacataccctccatccggtaactgtccgagtgggaataagttcattgttgtcatttgttaccacagtcataccaccctttttcggtatacattgcaccggagaagtccatgagctatcggaaatggggtacacaacaccagtatctaaccacttgatcacttctttcttcaccacttattgcatttccccattcaatcttttttgatgctccaaggaacgctttgcatcatcctccaagataattttgtgcatacataatgcggggcttattccccgaatgtcagccaaagtccatccaattgcccttttttgcctttgaagcaccgccaaagtggcctcaacctgcatgttagttagacaagaagaaagaataactggtaaagtagaatttgagcccaaaaactcatacctgagatgtggaggtagtggtttcaactccaacaccggtgactcctcaattgatggttttgttggtggagtttttcggttttcaagatccaaagataatttcctaggctcataagaataagagcctatcccatgtaaggcattcacgcactccactctgcttgcattatcattgacatcaagatttaatagcatggcctcaaggggatcctccacgttgatcatagcactggtgtcatccacaatcacagctgtgacaaggtctacaaatgagcacacctcggtgctattgggtttcttcattgatttccaaacatgaaagacgactttttcatctcccacttagaaagtgagctcacccacttcaacatcaaccaatgccttccccgttgtaagaaaggccttcccaagataataggaacctcatagtccaccttacaatccaaaatcacaaagtcggacggcaatatgaatttgtccacccggacaagcacgtcattaataatgcccaaaggtcgcttcatcgatcgaaccgccatttgaagtctcattgaggttggcctagcttgcccgatacccaaagttttgaaaaccgagtagggcatcaaattgatactagctcccaaatcatatagagccttggcaaagtccgcactcccaatggtgcaaggaatggtgaaagcaccgagatcttcaagtttcgaggccattgaatgcactatagcactaacttggtgagtcatctttatagtttcacaatccatagaacgcttctttgtgaccaagtctttcacgaattttgcatagcccgggatttgttcaagagcctccaccaaaggcgcattaatggacaggatcttcatcatgtcaatgaactttttaaactgattatcatttttctgcttcgcaagcctttgaggataaggtggaggtggcctaggcaaaggaaccttggcttttggcacaactaactccggcatgtcaattatgtgtttcctagacgggttcacatcattttgagtttccacctcgacatcgttaacatcaatcctcacttcattgttcacatttttatcaaccacatcttcaactaccaaagggatttcctcttcgtgcaactcaacatcatcatccaaaacttgcttttgcttagaggcattcacatcaccacctctcccacttcttgttgtaaccgccatcacatgattgtttccactcttcgggtttactaccgtatcacttggtagagcacccttcaggcgggtattcaaagactgagagatttgtcccaattgcacctccaagtttcggatagaggtattgtgggatgccaattgtgcatcagaatccacattcttcttcatcatttgttcgaacatcatttcaattctacctaaatcattgctagaagaactaggaccttgagagaggaaagggggtggattgtttggttgttcgtacattgggggcctttgaaatccttgcccccggtttccttggttcccattattccatctaccttgattgttattattgcccccattgttattattaccattccaattcccttggttgccttgattgttgttctgattcccccaattgtcgttttgattattgttcccccaattaccactattttactgttgattgccccaatttccttgaggtatccattgttgttagtttgaagagttgcctcgttgaccttgatagttgtttacatattgaacctcttcactttggtcatcataaccataattttgacacccattatagtcatcaacaaattgctcagaattcccttgattttattgccttttttgtcttctcttggtaacaagcatattgacaccctccatggcattcacctggcaaggattctggacttgttgcaactgatccttagccaattggttcatggtagtcgtcaactccgctatagcttgtccatggtcatgtaatttcttatgcaaatgaataaccgtggggtcaccttgaggcacattggctctactttgccatgcagaagaagtgtcagccatctcatcaagtacatcacatgcctcatcatatgatagcttcacaaagttgcccccgaaaagttggttcactatgcattgatttgttgtattgatgccctagtagaaggtttgttggatcatagcttcggtcatatcactccttcaccatcgttctacaccgctcccaaatctcatgcaaaggttccgtggtctcttgcttgaaagccaatatctcatctcgaagtgccgccatatgcctgggtgaaaagaatttagaaatgaatttatctgccaactcatcccaagttgtgatggaatggttggggagtctctcgagccaatctaatgccttcccccaaagtgaaaatgggaaaagtctcaatctaagcacatcttcggacacattcgtttgcttgctcccccagcatgtatccacgaaccccttgagatgtttgtagtcattttgatccgcagcgcccgtgaagtatccacgctgctcaagtaaggtcaacatcatattggttatctgaaaattgccctcacagattcggggtgggacaatagcacttgcatagccttggttcggtaatactctgggagccactcttggaggtggagaaggagggtctggaatattgccatttggattagcattggcatttcggcctctacattgtccttgaggtacaagaggcacctcatcttgttcaacatcatctacctcctcccccgcaatcacgtttccaagagggtcattagtgttgttcaatgccatattggtacctgagtcgcaacacaaacaagtaagtaacaaagaaggaaagaagaacaatacacaacactaactgaatagatagccaaaaccgttagctccctggcaacggcgccaaaaagtgatcgcgacctactccgcactactaattatgtagcgagagagggtcagagcagcttttacccaattttgggtcgggatcgatatccacagagagctagaattggaattgagtatctatttagcctaggattgcgtagcgttccaaattgcacttctcataatttttacggttttcttttataattctacttttaacaaactacaaactgcaaattaagctaagagttaaatgctatgggttgttcaaatattctaaaagctctagggtagtggcatccacctaagtggtcaattgacgggtacttgaaactaaggctctattgatattattggggagtatgatataaccgttgcactactttacccactatacacctctcgatggttcaagtgattttgcctaattgactttctcaagaccaataggtatgcaaatttgctcaagcaacttagggttcaagtcaggtattactctctcgaggtttaaccctttaattgagactatcaattctcttgagtccatcccaattccttgttggatcaatttcggagacttaggccctctttctaaagaagagcctaagtcaacttagcacaaactagtgtttgcaaccactaattcagtaaataaaccatgaaattgacccaaataacaaacacctatagtcaatctagccctaaagtgaaacacccatcaatttcccacactagggttgagccacaaacctagctaatgggtctagctactcatacttgaagagaaaaatagagaaatagatgaagataaacacatattaattaattgctaagctaaatacaaagattcaatgataaaaagtaagtataaatgcccaaaatggctacaagatttgttcccacgagtgcaataactattctaaaatgtctgatcccctaaaaatggaaaaaggatctatttatattaaactgaaaaatttggacaaaaatgcccctgtggggttagtgcggaccgcacaaaatggtgtgcggctgcactaggctcttgaacttgaaaacttgactctctgaactcaagctctgctgaccgcacagaatggactgcggccccagaggcttctagtgcggtccgcacaaactggaccgcggaccgcccaggcttgaaagctccaacttcaccctctctgaaccttagctctgtagaccacacagaatggtagtgcggccgcattgcctttagtgcggacctcacaaaaccttctacgaccgcactgccttaatgcctgaaataccagctctctgaatttccctagtggggaccgcccaaagtgtagtgtggctgtactaggcctatttttcctgagtttgtcttgtctttggtacttgtgcaagtttcactcctttcgagttgatctttaacatcttgtcactttgttgatcaaaccttcaatcatgcacaacttatgagcctttttggactattttgtgtgaatttataatcaaagcataagcaagaaggagtataaaatgcgtcaaaatccctagttatcacatgcttatatatgcatatatgttattttgaaactatatttatgtattaaaaaaatatatataggaaaaaattgggtatcaacatcgaaaattacaagtttcaagattatctgttgtgatggtcggtacttcaaatcttgtcttcaagtttcagcaagcctacacctcgacaaaccttgaagtagggggcagttgtagacactaaaattttaacagattaagataaatcctaaattcaagacgattcttgaattattaggagtctattagggtacttggtggctactccatccaaaccctaattcatgcctacaaataaggctacatatgttcttcaaagacggtctcaacagttccataaactctcaaaacatgcacgagatcaaatatacgatctctaaaattccataaaattcttggaatattcattaatagatcaaagacatgccaaatatgtcttgctgaaatttctagcaacagtcaagatccaaacggagtgctgctatattcttcttgatcatcaaatacatcaaggagatgcatatcattctactttcgagaaatatgctgctaagaccctcgaatcacatagaataaatcggagggaagaatcaagggataaacagagttgtaacctataatgtttataaataaaattctttttttctttatagttgtttgtgattgcaattttgtttttctctgcataaatttgttgcaaacaacatgtattattttcaatcaagaacaaaaaatataaaaatagtgcaccacctgtagtatatttgcacatcctgttgttacagttgatttccatgttttaatttctttcttccgacgtacgtaccaatattcattaagctagatttaaatttacattaaagaacaaccacaaagattaattaatgaaatttacatgtacggttccaatttattccgatgttaattgtatgggccaaaaattatcttagctgtatttgtcgcgcctcctttttccctcttcgcatcggaaatcggggttatgacatttttgaggtaggacaactcattccttttgggaactggatttgcatttgaagagtcgccacctaatgatttaaggtgcattaggacacctatagggttcattttgaagtttgtttgatgaccagagataggtaatggcttgaaattatcctaaggtgaaggtgttaggcacctctcaggatccactagtgtggttcccggccagacagttttgtgaattttgtacaattagcaaacagacaaatataggctcaaatagtaggggatttaagtttaaacacataagagtttgaaaaacaactgtaacaaggcaaattttgaaaaggagttacattttacaaatacttgagaatgtaaaaagaggggggtgggggatcctaggtttatttataatatggatcacatcaatgcgatacccggtatgacactcatcgaaagagggaatacacgtggtattagtgcaccggtcatcatattcatatctatccttcccacctcgttaaggtatcaaagtgcagattggtctcgacctctattgtatgttattacccgtcccattcctatcagtcccggaggaatttaggactactattcctataagagggaggattttaggctgactcttgagttttaaaggtaaaaagtctaaggcgacatacaaaacacgtagaactgcatattagggaaaacatataaataaataagaggctcatatatacctccgcagacaatgcacataaatagcatgacttaaaaacagttagggtctaaatttaaagtactaagacagggtgtttttgttgaagcagacaaatttattacataactcagataagaagccccaatcatgcctgcctgctagttgtagcagttgttaattaaacaaaggcggattcagtttaatcatcaatacctgaggcttgcctaagtgtgtattggtgatttcctataagcatgatatatattactgattaagaaggcagcagagcagtggttaatttttaaacagacgatttggaccctataggcatcctttctaaaccgcattaatgaaaggaataggttgttcaaactgattctgaacagtacaagtcaaactgattttttactaaactggtctcagatcctatagacatgatctcgattatcgctgattttaattcctaccagcatggtatctaaatattaaatgctgatttgggtcctataggcatgatatctagttgaacgtgaagtgaaacaagcaggatttgatcacagcgaaattcctataggcatgacttttataaaaatattgattttaatcttataggcaatacatctaatttcaaagctgattttaaccttatatgcatgatgtctaagtgtggaagtaaaacatgcagaatttattaaacagatcctataggcatgtcatctatccttctaatagctaaaacatgtataatcaccccatcccttttcactagccagcccctcaatatttgttacaaattattacagaccaaaaatgaatgagttacatcagaaaagtgcgaaaacaaggagttacaaccataggaagcctgattcttgacttcctctctgagttatggaataaactacctcaaaaaccaatgttctcaaagcctttcttagatctggttgtgtcaaagttccctaagggtctcaagggaccccgggtagtgcttacacccaagttgcataaccagacaaagatgagtgcagtgtggaagggccagggcatgcccacaaactagccagagaacacaaacacatagaggggatatgggggtttgggattcctaagtcagcaaatcacataacaagtgactgacagagtacatatataagggaaacattaatttaaaaggggatggagcatattacaacatgctagtaatgtaacttgattgcataaacataagcagaagtaggcaagagtgaaaggaactgagatagctaaagaaacatgttgttgttgatgcttcaaaattagcatggacataccagtagagaaacagagtgcagaaagaaagaaataagcaagattccacagtctagccttgggctttcagctggctaaacaaagcagtagcataagcagcagtaaagaaaagagagaaagttttgagtgtaagtgtgtgttcttgaactcaattgttcgtgtctttgaaagaagagagggtgcagggtatttataatttttgaaaacgagtgaaaagtaaggtaagaagtaaagtcttaacagaaatatggaagcaatcccaatcagaatcaattaacataagtggttccctttaattaagaaatcagttttgggaaaagattgattattgccatataagggagtagtaaaattatgaagtaaataatcaagtctaagtataaaataggcttattttgggaaaggattcagcaaggtaaaacatcacagtaaagggaaaggaatcaattaattttaaacaggtgagtgaaattagggttcataaaagaaaagcctttgcaatcagtcacaagatcaagatcaatcaaaggagaaacatggttctgcatttcagtacataaatagagtgaacagaagcatcagacatgcgaggccaaaaacattggcaaaagagataatacaaacatacagtagtggcaaaaataagctaggattcagtagtaagaaaaagtattcaaagcacagtagtcaagtaggtcaagtagtcacatagaatcaacagtgaagaagaacatagtatcaggtaagagaaatcggaaataagtaagtgagcaaaaacttctaagaaatttagggcttcaacagtagtcgagtttaatagatgaaaagaactcaaatcaaacaagtcgaacaaggaaaagagagtcataaacgaagaacttaagataagcacacatttaagcaaataatttcagaactcggataagactaaaaagaactagggttttaaacatgctgactcaagtagaaggaaagcataaacaggtaacatagcaaaatcatgaaacaacaccaaaatcagagaagagatctttaaaagagaggttaagagaaaccctaatcggaaaaaatgaagagtcattttgaaagaaaagttgaagaaccttcgagaaaacacttaagaaatacatagtaagcacagatctaaaatagatctgaagaaaaatgaaagatcttatagattaaggttttggaaaacgcagaaaaggagagaaagaccttgaaagttaccgatctaaaagtcaaggatctgccttgaaaggccatgaatggccggagaaaggtcatggatggccagagaaaggccatggacagaaatagagcaaggaatggaccagattccctcgaggtctggccatgaaaccatataaacaaacacgcaggagccgcagaaggctaatacacatctcaaatgtccatgagaggccatggattaggcaggggttgaggtggattcgggtgggattagatggcgacggctagggttcatgagggattgtagagagagttgagagaagagggattcaaggacggagtttggtgaagaatgaggtagggtaaggggctttttgggtttaattatggaagggtgaatggtggccgttgatttgagtgatcaacagcctggattcaaaagggtaggtgaggaatccgggttgggttgtttaattaggttagggatcgggttttaatgggaattgggccgaggaaattgggtttaatttggggtcatatttaggctaaaattgaaatgtaactgggctattatttaaatagacaatttttcccttttaaaattataaaaaatagtaaattaattcctgaaaataaattgagagtactaaaatgatttgtaacatataattaacaatttaaaaatacaggcttaattttatgaatataaaacataattgaatcttaaaagggccaatattgcaattatatgcaatttagcttaaaaatagtaaataattttataaaaaatatgcaaaaattaccttagctatatcgtagtataaatataaaagtccaacaaatgaattacaaaaataataattttggtcacaattattggttttttatggataaaagagggaaataaattgatttaaaaacctttaaaaattatgaaaaaataataaaacacttggatatgcttaaatatgcatatatattaaatttgaagttattttgcatattgaaaatatatagggaaaaattggatatcaacagttgccctctttacccgggaaggatgaaagagttgtcgggtaaagatatgatggccaattttgaccaagcgaaacagtttgaagagatttaggacgcaccatggattttgatctacctacatacccctggttttacaagaatcaggtcatatgtagttcaggatccgtcggtggagtatgccgatggagacttttcaagaacggacgcaatatccaggatggggtgagtggacggcttgtgggaatggttaaggttttatatggctgcgggaactggagtgggaccgcttctgccgggatgtccgttgctcgccggtttacctgcaattagaaacaatacaagcgtatatcgcgcataaatttaaacatgatgcaaattcacgtcggaccatgaatgttgtcttcggacgatgaggatgatgtccttagaccatgattccctgggccatgaagcgtacaataaaggactcgccggccatgaaatgatgctctcgggctatgaggatggtgcctccgaaccatggtgcctttgaataatgatatgcaacagattaaaaggggtcctcaggccatgacatggtgttcttaggctatgaagatgatgcctctgaacgattacgcctttggataatttggcgatcttttagcccatgagatgcagtatgaggcaatctttcagcccatgagatgcagtagcatgatgcggacaagacagagcttagtcttgcgaattgaaggacaaagcttagcccgtaagagaaatgaaatagacgatgcttgagatagtgcttagtttcgaagaaaattggaggcagagcttagcctcagaaggtataatgatagccttatgcaaagatgaagaatgcggagagaggtagagcttaacctcggaagacagaatgttaaccttatgtaagaatgcagatggagacatcgtttagtcttggaaggcaggacggtagccttatgcaaaaatgcaaatacagaaagaggtagaacctagctttggaaggcagaatggtagccttatgcaaaaatgcaaatccagagagaggtagagcttaacctcgaaaggcagaatggtagccttatgcaatgcaaatgtagatggagacagcgtttagtctcagaaggcagaatgatagccttatgcaaattggaaggtagaatagtagccttatgcaatgcaaatgcagatggagacaacgcttagtattggaagacaaaaaggtagccttatgcaagaatgtagatggagacaacgtttagtcacagaaggtagaatgatagctttatgcaagaaataataaaataacgaatgacaatagagttttcttagctgatagcagattgtggcattatgattattgggagcattgtgactacggagaattacttgtgtactgatagcaaatgttggcaagtgcaatggttcggagagtcgtactcataggcatatagtatgtttaatgattttgcgattctagtacctgcatccaaagaaaaatcgtgagtttagatgaaccgacgactgctaaacaaaacaatttcaataataaacatgcatgcttttgtaaaaatatgacataagtgtataaatataattttttagatgaaccgatgactgcgacgtagcttgggacattgtaacctctccagctatggaattttgagggtccttctcaaaattctaccttagtttaacaggtttatgtttctgactgttgctcatgtggtgatcggctgaaattacttcagaattttgagggtcctccttaaaattctgccccaacttctaattgtggtgggaaatgaaaattttattgaattgtgaccgaacccatagggttgcctatgtatcccctcttaaacaggaaacaggtcaggtgtagttcaatttacatcatataaggaagcataatgattacacacagtaatgcttgactgcatctgaattgatcgactttggccaaacttcttctccgtccatttctacaacatccatctagatctgatgataaccagcgaagtaatccacaaatgactgtaactcatgcttggtgcaattgtcaatcaggatgtgtatatttggcaaagggaagtcgtcttttggactcgcccagttgagatcccggtagtcgacacaaactctgaccttcccatccttctttggcactggtactatattggctaaccatgtcgggtactctactaccctgagaaccttagctttgacctgcttggtgacttctttcttgattttcggactcgtatcaggtatgaactttttgagcttttgctttaccggtggacacgttggatcggttggaagtttgtgagacataatagacgtactcagaacagtcatgtcatcatacgacctgacgaatatgtccttgtattcctttagaaattctgtgtattcttccttttctaatggcgataggtgaacgttgattcgtgtttccttgacattttctacatctcccaagttaacaatttcggtctcatccaggttggacttaggtctattcttaaagttctcaatttctttgacaatctcatctggtatgtcatcttcctctgaatcattgtccatttgttgcgttgtctcattacatgtcacagttattggttcatcaagataagtaatagtaatgttgtataagtaaagtaatgggagaaaatgataatgagtgttgatttatgagaaaaaatcaaaatgctttgataaattgcataattgttttgaacattgaaggttttattgcgggaattgaaaaatgcgaaaagaaaatcatttaataaataaaacagagaatgatgcttgttttagccttgccaccccgaggctcgttaggttctggttgtcctaatggtccaattattgaggcgtgcctctctgctcatagcttgtatggaagggccttcctccccctcctccttgagaacaacacaatagtccatgtcattgtcttctaggaataagctcttcaccgctgaaagtgcttcttattcgtctgacccataaacaatgtcagcctgttggaaaatcttctctagatccagtattggctgctctagtggatagtaaggactgcgccatggtggcgaccagttgttgaattcttcccaagtgtagtcatatcccaaaccgaaggtagtgccatgcttcttgagttgtatgggcttggtgatttcttggaggttcttgccgagacccttgccaggttcgtacccactccaattcagtatactctcgattttgttatcccaccatttatctttgtcaacaacattttcccgttcaatgtggtggtaagtctctccacttagctttcttcttccttcgattgccggaatggtctggagactgtatatagggttgctactgtcgccgtgaatgatcacctcctagtgtttccattcgaattttactgcctgatgcaatgctgacgctacggccccagcaacatcaatccatggccgccccaatagcagattgtaagatgctggcacgtctatcacctggaaattaacatcgaaccatgttggtcccatttgcaagcataggacaatctcacaaatggtggatctctaggaaccatcgaaggctttcacattgatagctccatcttatatctcgtgtagtcccttacccaacttcttgagtattaccagtggacaaatgttgagactagaacctccatcgatcaggattctggtgataaaatagtctttgcattgcacagtgatgtgcaacgccttgttgttccccaacccttcaggtggcagctcgtcctcatgaaaggtgatcttatggctctccaacacttgtcctaccatgttagccatttccccaccagtgatgttgcttggtacatatgcttcactcagcacctttagcagagcattcttgtgtgcctcagaattttgtagcaaagcaagaatggatatttgcgctggtgttttgttcaactggtcaatggccgagtattctttggcctgtattttcctccaaagatcgtctggacccatctcaattgggcggcctattagaggcctgctttcttaactcagctagatgttcaggggtatagactctaccagttcttgtcataccctgtgctgcaacggtctcttcgaacctgaccttgcctttcctcctcgcctcggctgtataatcccaagatacaacctttgtatggaatggtgtcatggttggcattgctactgggattggcacggctaacctcactccgaatggagcatatgcctcgggtagtaaaactgtaacctcaaatattgtgggtgcattttacggagacacgaattcaacctcaattagtgttggtgtctttgcggatgaagttaattcaaattcaagtggtacagacaagtctacctcagcatcctcagacggttgtatctagactatgattggattgagagtgactgttagcttctttgggtcatcacattctatgatcaacccgatagatccatcgagatcctaatcatcctctatttcaatcatgtggatacctctacccttatggtctggcatagggttgttgtggacatttggagcaggttcctttgccataataatcttgttatcaattaaagactggatcttgtctttcagggaacgacattcatcgatggtgtgccatttcatgccggagtggtatgcacaggatttgtttgggtaacccactcagaagggttctcaggggttgcagcagagatggaggtgacataactagcagctttgaatctctcgtacaattggtcaatgggtttggcaatggctgtatattgttttggaggactgcgatcaaaattaggtcgaggtctagggaagttttggcgtgtaggaggtgattgatagtgggatggtggagcattgtaggtttggtagacatgagcgggttcgaagtatctggttgaagtaggttgatatgtgagaggtagaggtgattgataagttggtggtgagggtgcttggtagtttggagttggctgatatatgagtggaggtgttgggtaagtttgttatttgaggggagattttttcctttgtgcaaccatcacggaccctacgtcccttttcttggatgcaccaccagactgcaaggccttatttgaagtttgcaaggccttgaagtttgtaaccatttcgtttttgataccctcttcaattctttcacccagtttgataatgtcggagaatttgtgactctcgatcatcatcaatcattcataatactgcgggtcttgagtccggacaaagaatttgttcatatgttcctcttctaaggcaggtttgaccttagcagcttcagacctccagcgagtagcatacccgcgaaatgtttctgtaggcttcttctttagattctgaatatagaacacatccgcacattttttgtgttaaacctaaacctgtacataaaatcgaatgtcatgcctacccagattgaccacttctttggatcttggctgatgtaccaggacaacacatctcctttcaaacttctcatgaacaacttcatgcggattctcttgtctttccctactctaaccatcttgtcacagtatgttctcaaatggatccttatatccactgtatcatcaaacattttgaattttggatgtttgtaccccttgggtagttcgacatcgggctatatgcaaagatcttcatagtttagcccctcaattcctttacttcctttaatgccctgaatccggctagtcaatttcttaagttcctcagctaggtttctgatgagcatgtctttttcatcagactcgggtgtgcttgagataggttgggtggagtgcggcatggtctacacgtagataggggtgtgaaaatggtcatttgtggagttttggggttctgggatgagtactggagtattgtttggtgtatggtaggtgttgcattgggtctttggtggaatagtgtgatggtgaggagcgggatgattctgtttctttgggatgttttgaggaggtgtagggttttgagtattgggaaagttgatatttggggtgctgagggaaaatgagaggcttgccagattccgaacctgatctagctcttcttggaatttcaacaacttttgttcaagctgggatacattctccagataaacctaagtaccatggccattagtggcctctacccgttcagttggattctcctttctgacgttgttcaaatcttccatcttgcctttattcttgtttttgacagaactaagaggaggagtgggtggagggcccctggatctcgtggaataggatgatgtttccagagtgcatgaactaacctttggggaggggaataataaaaacaaaaaataaaaacaaaaggtaatcaaattattgaagaatataggaagtattgcaatatttaaacacatagtgcgggaatgtaaagcgcgtcctaatttggggacctctttgtgcccgaggtaggcctagcgacaaatttatttggagaacttaggatgctaaatgcctcattttattgataaaaagtagacgaatcccaaattgataaataaacaggaaataaaagtcactaatggccatgggccttattacatttataaagcaaaaagataaactcctatctacttggtcccagaaagaccttccccagattcagcatccttggctccgtctaacagcttccccaactcgcgaagtcccagcaacaggtatactctggttaggtgtccgccttcggtccctttcgcattttgacaatcttcgtcccttttgagaaactttctctcaactccactatacctcgctccaagtatcctagtcgcttgttggcactgacagccatgtccttccattcctcaatcagcttctggttggactcttgtatctcgcggtgttcgctttcgtactcccggatccttttgcttagttggttgtatttgacctatgcctcagcactttcatctataatcctgtgaccttgagcaaaccctagctggcccagaccatcatgattgtcttccaaccaaccagagtagaaaggagcgcaactagcatgatacctgtctggctcgatggtatctctccccattatgatcttgtagtgccacatatactgatcttggcacttgtaaggactatcatcattcttgaagtcatcccgaaaatgactcatcttgtcgacccttggtataacctgcttcctaccagcttgcctcataactcggagagggacgtaagggtatgttccgctcagactgatcagtatcaggaaaggtgcatctctagatcgagcgatcaactcctcggttgaaaactactcgaacaaccattggacccattcctcagtcagaatatcaaatagctcaacccatcctttggcatcctccgactgagcaaacatattggggatgtaattcattcgctttggatgatggaaagcgatgtgatcatcccagtccctttgctgaatcacttgttggtattctcccctttggagatgttccatgagccatagttgaagtaataaatttctggcttcaaagtgttttgctcctcgttgatagttgtccaaggctcgatatatgtcttcaatgatcatgggcacgatgttgaatggctgcccaccaattccttccattagggtcttagttaccatagccaacctagtatggattcttgctttcttcatcggaaacatgatcagacccaggaaacaaaacatgaagacgaaaaccctacgatgaatgtgccccaaggatgtgatggcgaactcgtcaaggtaggtatggtaggatttgctgtgaccgtacctttctaacaaataatcacaagggatgtagaattccttcagacatgtcaattctagattcttcttcaaacctatcatttttaggaaacccctgcctttacggttctcaagcatcagtagacccggagtttcccatactagaccggccaatcctcctatatcctctagcaagggtgtcatttcaatgtccccaaagtggaatacagcccttgataatcccaaaacagtgtggcagcttctatgatcttgttgttaggttggatctccaaaaggggtggtagatttcctagatattttcggacgagagtttgatcactagagtgatgatctttccaccagattagcagtcttatgtggatgatggtgaccatgctaaatctagggacttcatgcctcatatttctgcaagacagaaaaggttaggcccttacccccaccagacttgactatttaataccaacaattagcatgcatcatttagttctccaaataaatgcacagaacgtgacgatgtccgtttaggcttagggaaacccagtggactttggtcaaggccatcttaaaggatcattatatggataacatagctggcctgactaggtttgaccatgatgcatgcacaatttgaatagagtaatggtttctatggggttttagactagtacccttgagcggacaactcaagggggaaggcacggaaccgtcgactacaccgctaatcgaatggttttatcgcaaatacgcctttacgaatttagggggtaatgatataggaagagcgcaaccactcattataagcgttgctatagtatttgtttggcacgagtggagtatgatgttgaacatgattatgcaataattaaaacatgttggcacatatttgcacgttaaaaaagcgataaatacaacagtttcataatttaaagcagcaataaaggaaagaaacaggaagacatgtcagttttgcagttgaaaaggatattaaatgcttaaagtaattaaacaagtaattgcacataaagaggtacaaattcacaagaacaatccaaaatggtaaaaccctaaaaatccccagcagagtcgccatgctattgcgcccccttttttcctctttgcatcggaaaatcgggtttatgacatttttggggtaggacaactcattccttttgggaactgggtttgcatttgaagggtcgccacctaatgatttaaggtgtattaggacacctatagggtttatttctaagtttgtttgataacatagatagggtaagggcttgaaattatcttaaggggaaggtgttaggcgcccctcaggatccactagtgtggttcctggccagacagttttgtgaattttgtacaattagcaaacagacaaatataggctcaaatagtaggggatttaagtttaaacacataagagtttgaaaaacaactgttaaaaggtgaattttgaaaaggagttacattttacaaatacttgagaatgtaaaaggagggggggtcctaggtttatttattatatggatcacatcaatgcgataccaggtatgacactcatcggaagaggggatacacgtggtattagcgcaccgatcatcatatccacatctacccttcccatccagttaaggtattaaagtgcggattggtctcggcctccccatcccattcctattagtcacggaggaatttagcactactattcctataagagggaggattttaggctgactcttgggttttaaaggtaaaaaggctaaggcgatatacaaaacaagtagaactgcatattagaggaaacatataaacaaataagaggcttatatatacctctgcaaaaatgcacataaatagcatgacttaaacacagttagagtcagaatttaaagtactaaggcacggcattttaattgttgaagtagaccaatttattacataactcagataagaagccccaatcatgcctgcctgctagttgtagcagttgttaattaaacaaaggcggattcagttttatcattaatacctgaggcttgcctaagtgtgtattggtaatgtcctataagcatgatatctattactgattaaaaaggtaatagagcagtggttaatttttaaacaggcgatttggatcctataggcatgctttctaaaccgcattaatgaaaggaataggttgttcaaaatgattttgaacagtatgagtcaaactgattttttactaaactggtctcagatcctatagacatgatctctattatcactgattttaattcctaccagcatggtatctaaatattaatggctgatttgggtcctataggcatggtatctagttgaatgtgaagtgaaacatgcaggatttatttgatcacaacgaaattcctatagtcatgacttttataaaaatattgattttaattttataggcatgacatctaatttcaaagcttattttaaccttgtaggcatgatgtctaagtgtggaagtaaaacatgcaaaatttattaaacagatcctataggcatgttatatacccttctaatagctaaatcatgcataatcaccccatccctttttactagccagccctccaatatttgttacaaattattatagaccaaaaatgcatgagttacatcagaaaagtgcaaaaacaaggagttacaaccataggaagcctgattcttgacttcctctctgagttatggaataaactacctcaaaagccaatgttatcaaagcttttctcagacctgggtttgtcaaagttccctaagggtctcaagggaccccgggcagtgcttacactcaggttgcataaccagacatagatgagtgcagtgtggaagggctagcccttatgtgtccaagttcagagggagctcaaggtttccaagtcaaggctcaaacaagaggggtagaaccaaggttataagattatagtggaagtgcagaacatagttgaaagagatttatttaaaactgggttgggaactagcaagtggtaagggtgatttgaaaatagtagtagtaaagctcaaactgaacagaataagtaattacacaaaggggtcaagggggttttgggaatacattgtatgaagcatatgaccccagaaagggtcaggtttgattcatgcacaacaatagataatgctggcatacccacaaaccagccagagaacacaaacacatacaggggatatggggttttgggattcataagtcatcaaatcacataacaagtgactgacagagtacatacataagggaaacattaatttaaaaggggagggagcatattacaacatgctagtaatgtaacttgattgcataaacataagcagaagtaggcaagagtgaaaggaactaagacaactaaagaaacatgttgttgttgatgcttgaaaattaactaggacataccagtagagaaacaaagtgcagaaagaaagaaataagcaagattctacagtctagccttggactttcatgcggctagacaaagaagtagcacaagtagcagtaaagaaaagagacaatgttttgagtgtaagtgtgtgttcttgggtgaagagtgtttatagtttttgaaaatgagtgaaaagtaaggtaataagtaaagtcttaacacaaacatggaaacaattagatcagaatcaattaacataggtagttccctttaattaaggaatcactatttgacgtgtaatagcaagtttatttaaggaaagaaatcataaaagaaaagcctttgcaatcagtcaaaaggtcaagaccaatcaaaggataaacatggttctacacttaagtatataaatagagtgaatagaagcatcagccatgcgaggccaaatacattggcaaaatagataatacaaacatatagtagtggcaaaaataatctaggattcagtagtaagaaaaaatattcgaagtacagtagtcaagtaggtctagtagtcacataaaatcaacagtgaagaagaacatagtatcaggtaagagaaatcggaaacaagtatgtgagaaaaacttctaagaaatttagggcttcaacagtagtcgagtttaacaaatgaaaagaactcaaatcagacaagtctaacaaggaaaagagagtcataaacgaagaacttaagataagcacacatttaagcaaataatttcagaactcggataagactaaaagaactagggttttgaacatgctgactcaagtagaaggaaagcataaacaggtaacatagcaaaatcatgaaacaacaccaaaatcagagaagagatctttaaaagagaggttaagagaaacccttatcgaaaaaaatgaaaagtcattttgaaagaaaaattgaagaaccttcgagaaaacacttaagaaattcataacagatctaaggtagatctgaagaaaactgaaagatcttaaagattagggtttcaaaaaatccagaaaagctgagaaagaccttgaaagttaccgatctaactaggaaagtcaaggatctaccttgaaaggccatgaatgaccggagaaaggtcatggatggccggagaaaggccataaacagaaattgagcaaggactggaccagattcactcgaggtctaaccatgaaaccacagaaacaaacacctaggagccacaggaggctaatacacatctcaaatggccatgagaggctattgattcggcaggggttgaagtggattagggtgggattagatggcggcggctagggttcatgagggattgcagagagagttgagagaagaaggattcaagggcagcgtttggtgaagaatgaggtagggtaaggggtcttttggatttaattatggaagggcgaatggtggcagttgatctgagtgatcaacggcctggattcaaaatggtaggtgggggaatccgggttgggttttttaattgggttaggggtcgggtttgaatgggaattggtccggagaaattgggtttaatttggggtcagatataggctaaaattgaaatgtaactcggctattattgaaatagccaattttccacttttaaaattataaaaaatagtaaattaatttctgaaaataaattgagagcactaaaatgatttataacatataattaacaatttaaaaatacagggcttaattttatgaatataaaacacaattgaatcttaaaagggccaatattgcaattatatgcaatttagcttaaaaatactaaataaatttgtaaaacaatatgcaaaagttaccttagctatatcatagtataaatataaaattccaacaaatgaattaccaaaataatattttggaaacaattattagtttttttatggataaaagagggaaataaattgatttaaaaacctttaaaaattatgaaaaaataataaaacacttggatatgcttacatatgcatatatatgtcattttgaagttatttttcatattgaaaatatataggaaaaaattgaatgtcaacagtatttagaccacgtcagtataaatagggccttcgagggctgccacgtattaccaatgtaactttaagaaaaaacagattcaaggtcgaagtcatatgacaagagatgaagggctagatcgaggggttaacagagatcaaggtcgaggacaaacactctccttaaacagagtaataatggctagttttaggataagactttaaaaagaatatttcacagaatattttctggatctgtactattagggttttgtggcacatgtacccttataaatagaaagagacatagttataggggataatgaacacccatttgtaaaacaacaacactttgatattctttgagattttttctttattacatatatataaaagatacctttttcttgagatccctgcctagattttttcccacgatccaaggaaaatatgaatattcaaaggcttatcaatcatttatcattgtcggaaggaatattagacagcttcattccctttttcggtcacctctgtcacatatatttacataaataccattatacatcatttattgctactgaatgttattcacttcatatttgtgccattaagtgttgttcattattatatatttatcactgttaccacatatcttgtaacattttatcacgacactagttaaacattctaagggatattattattggctaacattaaccccaccttgttaaaaaatctaattgtttaaacttgatctaaattttggtcaaaacgtttggcgtcgtctgtggggatttcttagctaatcttttagtttctattaagtctaaaactcaagtgactttctaacctaagaggccacaaattttttctcctctctgcatgcacaaacatttccctggaaagtaaccaaggaaaagggactagggcgacatgggacataccagtaacctcatgagctccatcaacgagagctatgaaatacagtgcgaggatatgacgcccactgcctcccctaggcgtgagaagtcatctccccttattgcaacacaatgaggctaaacagaaaaggatcttccatgtatacgggagaaaggaagccacctgcaatgaaaaaacccctcgaagcatgactaactgataccctagtaagcgtgctcaaaaaacaagctccatgcacgaccatagaaatcacaagagcccacatggtacaacgaggggacgaacatggcgatcaaccagaccctccaactctaggtataacacacaatgttactgacagtgcagatgacaacgtcctcgccgctattttgaaaagaatggaagaaatggagaatgaaaataagacgctcacagaccaaatgaaggaacatggggagcgagtagacaagatatcgggtgcccctaagttaccgccaaaaagggacgtcggtaggtttgtagagtagccatagcgaggaagaggccctacatgccataccaaataccttcaaaatgccactgtatctctaatatacgataggacaaccgacctcgaaaaccatgtgactcattacgtcaccgccataaagggcaacgacctcaccaaggaacaagtgtcctccactttgttgaagaaattcagtgaaaccctccctagaggggtattaacatggtattcacggctaccagcctgctccataaaaacgttcgaaaaaatggctgacaagtttgtgatggcacatgttggggccaagaaaatcgaaacgagagtaaacaacatcttctccatcaagcaatccttaggagagggactgagggacttccttacccgattcaacagggtaaggatgaccttaccaaatgtatccgaagggattatagtcacagcctttaagaatgggttgagtagatagggttcaagagcgacaagatagctgctgagccaattgatgaagtatcctccaacgacttgggatgaaatccataatacctattgtgctgtagtccgagcatatgatgacgacatcaatggaccaactcgatgactcatcttgatacaaactgaacctaggaaagaataaagagataacatgaggagggattttccaagcaccgcgtccggcgaacgttggaaatcagacctgccttcggggctgcgggagatgatatcctccaccgagggaaaagtttcattctttatggtggtagctgcattctccccttgattagggaacacaaccaccaacggaacaatgtggctcccttcatcaacatcagatgatacatttgacatctttatgagaaagtaaagacggatactggaaagagagtttaggatgcgaaagaaggaaacaatgcataaaatagaggttccaaaaggatgttttaagtctcaaagtttggaagaataaaagattcaaattcaggtttggccatccctacatatagagattgaggcaccgattccgaaatggttgtcataatgggcaccaaatctgaaatggctcatcataattgacaccggaactaaaaccacagatccaatcaaagtgctagcttgagtaagtttgttttgatgattgacaaaggaacacatgcatgaatcaggtccaaggacagtgtacacatgtgatggattaaataaagcaaaaggcttgcacttgaaagagataagtataagtggttatatctaatattccttgaacgaaaaggttgcatatttgataaggagcaggactccttacttgaagagaactctatccaagataagagaagaattataagttgaagttgactagaactcttttaccaaggaagagtaaagtattagaactctagttaatctttatttactaattctataaatattagtgttgttttcttttacaggtgatacacacatacttaagtaaaaagcacaaattgagagcaaaatagcaaggcattttgtgagcaattcctgtgagatttatgagtgcgatcttgatgttacacgaaccagattgaagaaccagctccataaagagttttatgtgtctttctttatttctagttcaaagtgtagtaggcgttttaagttatacctttcagttttctaagaagcaaattatactaggtacctgagttgtatctttcaagttagagttaatttgaagtagtcgcaacagcctgtggctggttgctataagggttagagttaatccttaggtttgcaagagtttgtaaactttgtggttggctcagagttgtggtgaagtgtttggagaaaatcctactgggtagtaaatcgtggttattactccccgcagtattatgtcgatattaggacctgtaatattatatgaagacgatgttacaccctttagtattatacatgaaattatcataagataattgacctcagtttaaggacaagattctttggtgattataagcattaagctatttcaaacaagtgatggataaatttgtgaagatgagagggcaagcaaatcgaagaaaataaattttcgtcaaagtttgatattttggaataaaatacgggccgagctaaaataaccggtacttatggattaataccatctaagttaccatatgaccgtgatagtaaggtgcataaggtgtgttaaaagtgagtatcaatctaagtaatttgagataaatcttaattatgtggattattggttaatggggagaatttgcaagttaattaaaattagtgggtaattaattattaatcttgggataagacttagacccctcccccccccccaacttggtaagccttctttatctatctaatgactattactgaaggtggaaaggtgtcacactttgagaaaggaaagtgacaccaagcttggaatgtggggcctacccaaaaattaaagataacattcataattgaacaatattttctaatctcttaagaagaattttagccaaactttccattacataacgttaattctaaatatcttgagaaagagtttcaacaaaaataattttgcaatagcaacgttttggctttgagcatttcatacggattgtttcctattttgatctcgccattacgtgtttctttacaatcaacgtgtgttggaggaattgtcaatagaatcagataaggtatgttaaagctaagcccttccttcattttgacatgatctcattattacatatggttgataaagaggcataaagagaagttcatgctcccgaatttatatacattatcctagtctcataagttacagtattctaccttattgggacttcatattctattgagtattgtctttttccagtcaagagagtagagagcctatagatacagtattacagtattttcattatcgttgagttataatgtcacgatcccagttctccctccgtgaactatcgtgacggcacctagtctctatgactaggtaagcctaacaaatgtagaaaagaaacaattgtggaaagaaaataattaaaaaccgagataacaaagtgaaacagtgtttaaggtgccgttcggcatataacagtacaagaatctcaacctaacactcccaaaatctagaaccccatgaatcacaagctaagagattacataaaaagctctaagtccagaaatgtctatcaacaaggaaaatacagaagggctatactagtactgagaatagaaagggactcttcggtctgcggacacagcagatataccttggagtgtctacaacagcacctcgcctaaagtgtgataagactgagtggaaatacctggatctgcacatgaaaaacatgcgcagaaagggcatgcgtacaccataacggtactcagtaagtgccaagcctaacctcgatcgggtagtgacgaggaaagtcaaggccctattgagattaaatgaaatataaggtatgacagtatagaataagacagtaaaaattaagtgcaacagtaagaaataacataaaatagaaagaacaacaacaactataacagagacaaaataatcacgaaaaagagtacaactcaacacagagataacatccagggatctctcagtatcccgaggatctcttagtatcttcaatatgtgtgccagggatctcttagtatcccgaggatctttgagtatcctcaatatgtatgttggggatctctcggtatcccaaggatctcttagtatcctcaatatgtattggggatctcttggtatcccgcactacagtccaaatcgatatatatgtgtaggggatctcccgggataccgtcctgtagtcctaaagtaaacacgcagtaacaacacgaagaatactcaattaaattcaatttcacaccaaggtaacaagtatttctaacataacatgcttcacatagtccaaataaggcagtttgagaaaataaaaacaattaaggcaattagacatgattctctaagctaacagcatgcttgattgcaagtagaataaacaagaagggaaaacacaattaaagttacttagtgaaaacaagattttcaacgattagcacaagtacgcactcttcacctcacgtgcaaggaatttcaaatatcaataataccaaatattaaggggagttccccccccccccacaaagttaggcaagccacttacctcgaacaagctcaaaatcaacccgaaaccaggttcttgccacaagtacttgactccaaatggcccaaatctattcaattcaattgcataatataaataagacttcaaataactgattttataaacaaattctaagctaatatgcaaaattagataaaatgaccaaaacgccccctcgggctcacatctcggaatcggataaaaattttattttcagaatcctcatactctcacgagtctaaccataccaaaacttgaaatttatgtctaagaactttctccaaattttcccccaattttcatcccaaatccgaaattaaatgacaaatctaagattagattataggaatacaactagaaagggattaggaatcgttacccacttatttcttcttcaaaatcctctgaaaatcgccatctcccaagatccaaatcggtgtcccaacttttgaaactaaacccttgaaattcttattttctgcctagtaaatccgcatgtgtagtcaaaattcccgcttctgcgctaccgcttctacgattgagggaactgcttctgctgttttcactaaaacctccatctccgcacttgcgacccatattccgtatctgcggtcccgcaggtatggtaacccttccgcttctgcggtatctgctgccttcacttgtggccacatctgcgtctctatgctctcttcttcgagtccacacctgcggtcccctagtcgcaggtgcggttatgacagcaatggaaaaacttcagctgccaaaccaaactaaaaaaccccccgttaaccatctgaaaccaccccgaggcccccgggacttcaaccaaaagcacgaacaagttatataccactatccaaacttatacaaaacttcaaaacacctcaaacaacatcgaatcaaccaattaaccatagattcaagcctaagaacttcagaaactctcaatttatgcttttgatcaaaaactctatcaaacctcgtccgaatgacctgaaattctacacacacgtcacatccaacactatggagctactccaacttccgaaatttcattccgaccatgatatcaaaatctcactatcaaaccgaaaacttcaaaaattcaacattcggcatttcaagcctaatgaggctacggacctccaaaacataatccgaacacgcccctaagtcctaaatcactcaacggagctaacggaaccaatgaaattctattctgaggccgtctacacactgatctgactacgatctaatttctagaacttaaactctcatttagggattaagtgtcctaaaaatacttcgaaactcaaaaccaaacatcccgacaaataaaaatagatgaaaacacggtgaaagcagttaatatgggagcgggcgttaattctcaatacgactagccgggttattacatataatcggtggacagacctctattgggcaacctctaatcagatggtaagttatataccgatcctactgcggctgagcggctatgagcgagcctagttggccgagatacagatcctagtatggttgagcacctatgagcgagcctactacggcagagcagctatatatatgccaaaccttataaggtcggatagctattttacttactatattgagagagttgagccagtatcagcaggtgagcatatcttcagattatctttgactcccagttactttaagttattatattatcaattcagtttcagctttcataatattgccttacatactcggtacattatttcgtactgacgtcccttttttgggagcactgcatttcatgcgtgcaggttcaaacagacagagaggtagacatccccattaggtgttgcccaagtttaacttgatcggtaagctccatgccctttagagttgtcgggtctagagctttacgtacatcttgtgtatatatgtatatatgttatgagtagctcggggccctattatgatcatagtatatccatcagtagaggcctgtacatatatcctgtcagttagtgtggtatattgggcttgtaggccttgtatgtatattttgattggttttccagctgtagtagttatgatagttttgtcggcccaacattatgttgatgtttagttagcatttgcaaattgtcttgcaatgtggcccatggccaaagtatgacattatatgttcaaagtcccttagtcgcaagtttgtacacaaggataggtgaggcacctcgccccccaggttcggggtgtgaccgaagtggtatcaaagcagttctgtcctatggagtctacaagccatgtctagtagagtcttgtgtttgtttgtgtaggtccactgaactatacagtacctggtcctctacaagattctgctgagaatgctaataaaatagtatgtaaatgaggtagaggatttttacgtgaaaaaatcccacacatggagatcaaaaaaactacgacttacacatgtaggcttttaacttcactaacttgtaatctacctattataagccactttacaataattcctgttgtaaaggatttactcaaataacttgtggtactcttaccacaaatcactttgtgacttcctagtaacaaagtctttttctaacttgtgatgctctcaccacaagccactttgtaactctacaattacaatgacttttccttataactaaatctagtcacaacataaactcaaggagtttatggattttcaagaggattcctaatcaaatgcttctaggtaagcagtttaggagataaaataagtatagtaacaaggttacaactcaactaggacaacaacaagctatcttttaggaaatggtccgtagttgcgttcaaccttattcttcaagcttgtaaggattgatttctctatttttgcaagaggcttgaatgagaaacagaaaccttccagtgttgttttgtataaacctcattgtgggtacatcttgatcacatcacttgaaatgatgtgagtactttgttttgttagagaatgagtgggaggacagtgcagtacggcagaaacagtgacgccagtcacttcatttctagttgtgtccaattgactctgtacagctatgacgaaaccacaagagcatcaggtccttgtgtgggtttctagctcctgaagctgtagcagttcacctttagctggaatacgttaaagcttgcagcaatccaagtaggtcaggttccctatctagttcttaacagtaagtttgttagattatcaaaacataaggcaagagtatttaaaatatatcaatttcccctttttgatgatgacaaacttaacatttataaactggaattagggcagtaccagttttaaagtatcagggaacacagagagttccccctaagactatgccttatcttttacatgatcagagtagtaagaactagttcctccatgtgtgttccccctgattattatttttttccttcttttggcatcattaaaaaaataacagcacaaagaagtccagtgaagctaactcatgccacatatgtgcacacaatcatgatagagaatagaacacatagagtactgacataataaaactagaattaatattaataacgatttaatatacctctgcctatgaaaaaggctagaggcaacatttggacttgctaacgggagtagtaatgtttcctcccaaccatcaaaaaaagaaaacaaaaaaacatccgccaaaccatcaacaatgaaacaaaaacataagaaacatatccagaaaactggtcactaaaggggtactttagggcactaggagtaaaaggattggtagcagcagaaaatgcctggagaacgaggtctattaaggtgtttgccgacttttgctcgttgagcagttccgccttcaagttctcaacttgcgccctgagattagcattctcctgtgtcaaacaagccacttcatcattcgacatgggaaccccttgggcttgctgatcttccaggataacattcatggccttcaaccgatgaatttcctcagctgcactgttttggacgttgataagctgagaaacggttgatgtatttcctactcctcccccccaatacttttccacacactcacactcttccaaagttgtctatgagaatgtccgctttcgagaccccactttacctattcccagtggaactttaaagaatttgaacactggagtaagaaagaatccatagggaagtccatgattaccgtccttgaaggtggaaaccttttgcatgtgttcgatcataatagcaggaagaatcataggattgaaaccgtcaagttgctccattaggaataggtcagacttagaagtcactaacctcctttcggctcgaggcaacatgactttgttaaccaatttaaataacaactggtaaacagggagtagtgctttcttatggatctagtcccctttctgattagcattttctttcaccattgcatttctgaagttatactgacaaacatctcgtacactcaacaccctaactgtaggaacttttaaaatctctccaagcaattttacatcaaacacgatgtccaccccattgaccaaagcatagacatggtcagtatcaactggaaagaggctagcaaagaaactttgtacctcctcctcatacaccttaggtgcatccatgtgaaatagatgcacccaacgttgaaactcgaccatttccagaatttggcgcattccagccatatcagagattgttgggtcaaacatacgacccaatagaactttttgatgcctcaaaagctcagagccaaggctgacttcacttctcattttcttcatagaactaggttcgtcaaaagattccgacttgcgtttcccaaacttctctccactgactttgccttttgccttagacttaactagtacatcctcatcagacatagaaaactcactcactacctccttctttttggacttagatgttgaccctttctctattgacacaggctttgtctttttcaaagatcgcctaacaagtgaaccgggttcctctggagttccctcttccacctcgactacaaggatagcctcatcacttacaggtacaccatccttcaccaacttttttctttttttttcttactactcttcttgctcgtttggagagtagagtcgtaggccactttgacttgaagcgtggtagtaggtcgtttgatttcagactcaagggtggacgcaacccttcgcttacttatgaatgcatcaagagccacattatccaggtcttattcatcactagatcgtatttcaggtgcttgaattcccaggggcacaacatcaaatgcaggaatagtactgtcctagggatgagagccctaacctgggtcctccggagagggatcaggttcctcatgtgatgccccagtagtatctgctattgcatacccttcaatagccacaatggccccttattcctccacatcgtgtatctcatttttttgggatgtaatttcatgcaataccccatcagtggatactacaaacatagttacaacatctttcttttcttcaaccggtgcttccaaaaccatgaaatcggtggcaacgatttcagaacccttgtgaactcagtattttgaccttgttctccacttagggtttgattggtgggaacaacagacgatggggagaacaaaatagtagttttaaaggtttctgagttgggaagatattgggaaattggggaaggtgtgactgcagcagcaagagtggtagagggtgaggaaggctcagtcaaaatgaaaggttccatatatgggtcagtggtgtagaacctgctcatctccatagaggcaaagagatcggaagttttttcagccattgaaagaagtggtgttaggatccttcccttttgggtgattctagtgtaggacttatggttaagaagagcagaagagaggggttttaaaaggagaggataattataaagggaaaggaataagcacttgttctgaaacggtggttgggcatggagaattgcaatgtttcagagggagatggaacattttgaattgaaaggacgtgacagcaagatctaaaaagttgatgacatggcagttgtattttgtacccttagacgtgtattaaaaggatgcatagaactactaacctttagtacaagaacctagttcttgaaaaaaaattcttctctttttttttgttttgaaagaaatcaatcctctttcatcaatcttgcattgcatctatttcctctatgctcatcatgtgtgtttacctgcaacggtattgaagtgagttagacatggccagaaaacactttgagccagttatttcttaaggataggtgccaaccaaagaggaaacaggttcttaatttggcttcaacagtcccagctttactatgtttctttcaaactgttccctacttagtgccttggtgaaaatgtctacaatttgatcttttgtgctacataacttcatacatatcaaccctttctccacgttatctctcagaaaatgatgcctcacatcaatatgttttgtccttttatgttgaactagattcttggccatatcgagtgcactggtgttgtcacatagaaggggcacactctcagtgagtaccccaaaatcctccagttgctttttgatccatagaagttgagcacaacaggatgctgtagctacatattcagcttcagctgttgacagagccactgaattctacttccttgttccccaagagataagacatgaacctaagaagtgagccattccagaagtgctttttctgtccacaagataacctgcatagtttgcatcacaagataacctctatacattgtttgattcagaggagatccagtttcatccatgtctagtcgagtggcagttgcaatgggagtgtctatcacctttgatgcttccatgttaaacctctttaagagttccctgatgtatttttgctgacaaatagaagtaccgtttggggactgttttactcgaagacccaagaagaggtttaattctcccatcatgctcatttcaaattcacttcccataagttttgcaaattcttcacatagagagtcagttgttgctccaaaaatgatatcatcaacataaacctgaacgatgagcaggttccttcctcgtttttttaagaaaatagtgttgtcaatttttcctcttttaaaaccattttctaagaggaactttgacagtctttcataccaagctcgaggagcctgctttagcccatacaaagctttgtccagtttgaacacatattcagggtgctcgtgacattcaaaccctaagggttgcttcacatagacttcatccttaaggagttcattcaaaaatgcactcttgatatctatttggaacaaggtgaatattgtatgagatgcaaaagcgattagaattctgataaatcccatgcgagccactggagaaaacgttttatcatattcaaccccttcctcttgattgtagccttggactactagcctggccttgttccttgtggtaactccatgttcatcgagcttgtttctgaatacccacctggttcctataatggtttgatctggggttctaggtaccaggtgctacacattgtttctctcaaactaatgcaactcgtcttgcatggctgtaatccaatctgcatctttcaaggtttccttgatatttttgggttctatctgggagagaaaggctgagaaggcaagtaaattttggctcttgatctggtttgtactccagaatctagaggagtgatgatgttatctatagggtgagagctttggtgtctccagttagacgcccaaggttcattctgagaggaggaaggtatgtttggctgattttcctctatccttctctcagatgctagaggagttccctaaactgcatcaaccacccttttttcagcttcagtggttgtaattgaagtgcttggttctgcttatgatgaggcagcgttgtcttcatttggctcctttacttgactcatcatatctactttttcgtttgtcatgttaatgccttcaccaggaacaagtaagggttctccatcttgatctttctcagcactckcactcttctcaaatgatggatatgattcatcaaaaataacatggatactttcctcaacacattgagtccgcttgttatatattttgtaagccttgctttgagaggagtaaccaagaaatattccttcgtcacttttggcatcgaatttaccaagatgatattttccattgttgagaacataacatttgcatccaaatgttcttaggtgaatcagcttgggttttcttccattcaacaattcatatggggtcttgtttagaagtgatctgatcacgcacctattcactaagtagcaggcagtgttgacagcttcagcctagaagttctttgcaattccactgtcaaatcagcattgttcttgccattttttctagagttatgttctttctttatactactccattttgctggagagttttgggagctgagaagttgtgagtgatgccattttcattacagaattcatcaaatttgacattgtcaaattctgtcccatgatctgatctaatgcatacaactctagactccatcttcacttggattttcttcacaaaagctacaaacacttcaataatttcgtcttttgttctgagaaacagagtccatgtgaatctggaatagtcattcatgattacaaaaatgtatctttgtcctcctctgctttgcagcctcataggtccacacagatccatatgtagaagctcaagcggctttgaggtgctcacatctcttatagacttaaaggatgacttcacatgttttcctctagcacagacatcacagactttctgcatcttaattagtgacaaaggcagaccacaaaccaggtccttctgaattagtttattcagaaaggaaaagcttgcatggcctagtcttatgtgccatagttcatcatcatcatcaacaactttcagacaactcagatcaccactctataaatattcaaagttagcaacatagatgttcttgtatcttttggccaccagtactatttcatcgatcacaaggtcagtgactgtacatattttggacaagaattccatcttgtttcctttatcacagatttgtgaaacactcaggagaccatacttaagtccattgacatagtacacattttcaataggatgagtgagtgacgtcccaactttttcaactccaagaatgtaccctttttaccattgccaaaggatacactccctcattgtagggattttagtgaaagaaagtttgtggtattcctagtcatgtgtttcgaacacccactatccatgaactattgacggccgcctcctttcaccgttccctgcataagagattaggagttagttttaggaacccaaacaagcttgggtcccttgtagtaagcaagaggatgaataagagctctcttagtccatgcagttaatgtgtgtttttttgtaagtggaacctggtccctcttttatggtcacggtttcaacagccactttgtctttctgaactgattgattcttggcctggacacctttcttgaagcgcccagtgttcccacattgggtacgaggctagttatcagagatagtgacatacttactgtgagggttgtgacgcattttctccctttggaaccctgcattcagccttttttcacaatcattattaagtaaggcagtggtagcttctaaggaccgggttcactttaaagacttttcaagatcattcattactctttctagattggtttggagaagctcatttttctcaatttcagcacacatcctaaatcttatagctttcacctcatcttcaagcttaatgtattcctcacttgctatctcctttcctctttcagaactttcaagttttgacttagtccatggttttactattgtttccctttggtatgcaatttttgccaacatatcactcttttcttttctaaggatttcaatggttttcttatggtcagtaactgcagccactaagtcttctatactatgttaagattcttctaattctaagatcaaagaatccctatcctccgcaagactacaaaaggcagtgattaaaacaacacctaaacacatgcgtttttttagagaatagaatttcagatttctcttaacatccctgaagtttacctctttgttgccattgtcttcatcatcatctgattgagccatcaaagcaaaagttgagtcatatccaatctcctcgccttcaactaccatcatggaactaccaccagtattaggtttatcttcagactgttttacttgtgtagttccctcatgagttgtttgcaaagcttcccatatttcttttgcagtgtcactggtagagattctattgtactcttcaggtcccattccatatactagaattttcttggcacaaaaattcttctccaccgctttcttgtctgcttcagtgtattctttgctggtttttgccattgaaaatggaaattcatctagtaacttgattggaacttaaggaccgccgcaaattatatcccatagctcacaatcctcagtcataatgaaatcatgcattctagctttccaccaccaataacattgtccattaaactttgggggtttgtatatggaatgaccttcttcaaaatttggtggagttgccatgaggatccttcctaggtgttagcctaatatgaggaacctgctctgataccaattgttagtttgtatgggtccaccaaactatagagtacctggccctctacaagattctactgagaatgctaacaaaacagtatgtaaatgaggcagagtatttttacgtggaaaaatcccacacaaggggataaaaaaactacgacctatacatgtaggcttttaacttcactaacttgtaatctacctattacaagccactttacaataattcctattgcaaaggatttactcaactaacttgtggtactcttaccacaagccactttgtgacttcctagttacaaaggctttttctaacttgtgatgctctcaccataagccactttgtaactctacaattacaaagacttttccttatggctaaatctaatcacaacataaatttaaggagtttacggattttcaagaggattcctaatcaaacgcttctaggtaagtagtttaggagatacaataagtataataacaaggttacaactcaacaaggacaacaacaggctatcttttaggaactggtccatagttgcgttcaaccttgttcttcaagcttgtgagtattgatttctctatttttgcaagaggcttgaataagaaacagaaaccttccaatgatgttttgtataaagctcattgtgggtacatcttgattacatcacttgaaatgatgtgagtactttgtttggttagagaatgagtgggaggacagtgtagtgtggcaaaaatagtgtcgtcagtcacttcatttccagctatgtccaattgactctgtactgctatgaggaaaccacaagagcatcaggtccttgtgtgggttcctagctcctcaagctgtagcagttcacctctagctggagtctattaaagcttgcagcagtctaagtaggtcaggttccctatctagttcttaacagtaagtttgttagatcatcaaaacataaggcaagaatatttaaaatctatcatcttgtttatgggtgtgttgttcaccacacttataagcaggaggcgacgcatttaggactgtcactctttcttcttactctagatcatgttgtagagcttatttgtaagaattcaaactattaaactctattttattcataataaaacgatacctacatctaaaaatattgttggtaagagatatgtctatggaagagttgcgccagtagaccttgactttgtatcatgtttatgataagtaaatgtgaggtcttcagcagatcatgtgtatactgaaaggtgtaagcttcttgataatgatccctaaggaaagaacatctatccactcttatggtaaaaagcaatgaaagaatcagaagatacaagtttcaacaaataaaagaagcaacgtgaacaagggtacaaggtacctaattagtaaagatgagcattatctacaatttaggaagagaaatataagcatttagagtcaccttcaacaataacaaaggtatgtacaattggccacactcatcttatttatgccctatgagggctaacaaaagaagtataagagagggaaggatattaggattcgactagggttagagcaacccaaaatggtggatagaatgtttgtgtttattcacatttttgaaggatattgcaaatgtgctaatagatctccttgtgagatacctaggtggtgtactctaaaatagtgaagctagatttgtgtactataaagataggcactggaagccttgaagggataaatattaccttagcatggctcccgtccctagtagataaagaatgttacgtaactcgaagagtcagtggatggagcaaggggagctaaaagcaaatgaatatcttgttgaagtatttaaaataaagtgatagacataaatgttagcgggaaataagaagagagataatgaagcattatgagtaagaagtgatacatggatgacaacggtagagtattactgaatctatggtcaaaggaaggaaaagacgaaaggtgacagaccttgatgcaacaaaagagtataagtcataaagtcacatcctcatttcgagaaataaattcgtgaccctaacgtgaataccagaaggaaaagttagaccccaaagtagcagaaatcagtatggattggtgaacaagctaaaataaacatgaattagggactgagtggtttgataatgttcaacatcatgagaatttcatattgcgttctggcgataatagaatggacaacaaacatagattcatgagaaatttagggaatgttcattcaggaagacgcttccttaaagcaagaaatgtgagaaaagttaagcttaagggactgtatgtgccagttacactaagtgtcaccctcgtgaataaggaatttcgttatccttggtacagaaaggatttttgcaagacgagtaagggtcatcgatgatgtgaaaagaagccaaagataaagaggtaaagcatctatacgtagatcttcgtagcactcaacttagcaccttcgtaaagggggaatatggagtaatgtgacattaagtcagaattaagtggttctagtaattatagaatggtaaagaagaatacgacaaaaaaagagggatgagattgcacttattcaaatgctatagataagctacgattctagaacattatgcaaacacgaaatcaaggaggggaagtgagggttcctgcctgagatgttattgacaaataaggagccagtacgagacttaagttaagaaaaaggaaataacccaagaaagattacgcgggatgttaatatgagagtgggctaatgattagtttgtagttgattcaggaagagcctagttatggctagaaaagaggacacagactaatcaataggtagtgcaagataaacatagtaaaccccaacatgcggaattcagtctcgtagatatgacatcatgatccttgagaaatattcagataggagttggggcagttaaaggtaccatatgagtgttactgaaataaaagagaatgccactgggaagacagtcaaaatattagttcagaagcaaccctacaagtacaagggcgtgaaggtaagtaactaaggataattataggtgagtacgaacataaaaaattctgtcgggtaaacgatataaccagcttgtaactttacaagagccaaaaggtccccctaagtactacaatgaaaaactagctgaggaaataaggaagaaggcttcaacctaagaacattgacctaaagagaaaatggtcatgtaacaacagtctcacaactacattatatgcacttcataataaaatggcacctaccgtgggtaatgaacgggaagtaaaattagaagtgatattcaagaccatatgagttttatggaatttcagtatatgtgggaactaagataagctaaatatgcacgcaaaaaggggacagaaagaccattaaaagaatttgcttacgtttgaagaaagctgagatggaacaaaaagaattattcgattaatgctccagagttagttacgttatgaacgcatttaagagttcggagtattatccacttagcatatatgttgacaatcatacagtcgtagaagattttggtataagttaaaagaaaggattgagtccaggtcatcgacaaaggatttaattgttagaagattgtatcctggatcttacatagcgtccatgagaggctaaactaataccatgagccgcagatcgaaagatagcttaagcctgcataaaggatgatcacatggaagaggaaactaaagaattatatcaactaagtaaatcaggagcctgattattggacctagaaagttattgacatcatgatggagaacattgcataatcactcttaatatcagaggtacaagagagatagtataatatctatattctataatggctctacgataaagctagttagaagagtacaagccttataagatgtcagtatgaagctcccaccgtattatgtatgcaccaaaggtgcaagtgttataatgagagattcaagttgtggatgtgaattgtacctatatggaaaggaggtcatgaaagagatagaagatatgatgcgagattttaaggcaaaagtaaacaacgtatgagatactcaaatgcagaaggttgtgaatagtccatactgtagatagaaggctagaagcgctggtatttagtacccaggaatgatagagtcgtcgttagtggcatatattccgtcttatggtttctagatatcgagaggtctagttaagggtgtaaaagaagagttatagacgatgtgatatctagcttgatgttccagaataataaaagaaaatgggtgcaagcaaggttgtgagcaatataaatggatatatgtaggtctcaagataaaatatgataaagcgacaaggttttaggaagacaagagcaaggacaagaaagggtgagtgagaaggtaatgagaaatagatgagtcctcggaattaagcccatgaaaacaagatagctgatggcttctctaagttatagaaagctctgtatagcttgaatggactcaaaggaatctacgactagtagcatttagaaaagatggaatgctaaataattgtgatagataaaggataacatttgtgccttcgaccgagtaatgatttgaagaggatttcatggattttacggaattaaattaccaacgtaaagtgaatcacattggaatgctataaaatacgattattgaagtacaatatcacccctaagtggatcaggaaaatcacttctaatattcctcgatgcagcataagctctagtggtaatgtattatgtaaaaagtttcaagttatcaacggaagattgtagatcaacattgaggtgaatcgataatggatgaacaaaagatacaaagtacgagatgagattaggccatcagacttaagatggatagtaatgaagaagtgttaaaaggcttagctttatgcatataggataagcaatgagagtaacctggagtttggtcgcaggcctcagtaacaataaatcgaagtaagagttatggtatagtatggcctacttagatatagtaaagctaacgattcccagagggacagcttggcatagttttgtatatgttcacaaagtgaggcctagagatcggctaagagctggaggaaataggagagaagcattgcataggcgcacataaagagttagagtcgtacaggcttcatgatagaaggtagcaatagttacgagattagaaggattccgactacatgtcatggtgtgaaaaagatgcttaaaggggggaatgccctagcctttggatttattcaaagaacaattgcctaaatggaaaggagaatattaaagtattcataagggctatgggttatgagaacgataagtgcattagccaacattcgaggacgaatgttccaagggggggggggatgatgttatgccctacagtattacgtcgatattataccctacaatattatacatgaaattgtcataagataactgaactcagttcaaggacaagattgtttagagattataagcattatgctatttcaagcaagtgatggataagttcgtgaagatgagagggtaagcaaatcaaagaaaataaattttcgtcgaagtttgacattttgggataaaatacaggcgagctaaaatacccggtacttatagactagtaccacacaaggtaccacatgaccatgatagtaaggtgtataaggtatgttaaaagtgagtagtattctaagtaatttgatataattcttaattatgtagattattggttaaagattgaattagcaagttaattaaaattagtgggtaattaattaataaccttgcgataagacttagaccccccccccccccaaatgtggaatgccttcttacctatctaatgacttttaatgaaggtgaaaaggtgtcatattttgagaaaggaaagtggccaagcttggaatgtggggcctacccaaaaaattaaagataacattcataattcaacaatattttctaatctcttaagaagaatttcacccaagctttccattacataatgttaattctaaatctcttgagaaagagtttcaacaaagatgactttgcaatagcaacattattgctttgagcatttcatacggattgttccatatttcgatcttgtcgttacgtgtttcatcgtaatcaacacgtgttggagggcttgtcaatagaatcggataaggtatgttaaggataagtccgtccttcctttggcatgatctcgtaattacatatggttgataaagaggcatcaagagaagttcatgatcccgaatttatatacattatcctagtcttataagttacagtactctaccttatcgggacttcatatttaattgagtattgtctttttctagtcaagagagcatagagcctatagatacagtattacagtattttcattaccatcgatctataatcgatgggcaggcccctattgggcaacctctaatcacatggtaagttatataccaagcctactgcggcggagcgcctatgagcgagcccagttggccgagatacagagcctagtatggttgagagcgtatgagcgagcctactccggcagagcagttatatatatactgagccttagaaggccagacaactattttgcttactatattgagagagttgagtctgtatcaatagatgagcatatcttcagattatctttgactcccagttactttaagttattatattattagttgaatttcagattacagtatattgccttaaatacttggtatattattttgcactgacgtcccttttctgggggcactgcatttcatgcgtgcaggtttagacaaacagagaggtagacctcctcattaggtattgcccaattttagcttgatcggtaagctctatgccctttgtagttgccgggtctaaagctttacgtacatcttgtgtatacatatatatatgttatgagtaggtcggggccctaatccgatcatagtacatccattagtagaggcttgtagacatatcttgtcagttagtgcagtttattagacttgtaggccttgtatgtatattttgattggtttgccaactgtagtagttatgatggccttgtcggccagctttatattgatgtttagtcagcatttgcaaattgtcctgaagtgtggcccatggacaaagtatgacgttatatgttcagagtcccttagtcacaagtttgtacgcaaggatagtaaggcatcgggtgccggtatctccccccaggttcagggcgtgacaataggtttttcaccttttgagctgggtgtttttcacgtaaaaatacttgttttcttcactttctgcatttattgttccacaacagtagcataaggaacacatacaagaaccgggttctcctataatctgtgcatgcaaaaaattggataccacataaatcccccccccctcttgtgtggtatggaagtataaaataataattgatatcagagcgggttatccttgatgaggctaacaccttaggaaagatcaagatgagtgcactacctgaaaactataaagagcaatccaccactaggccagtactattcaatgatcgctattatttttttgtggaaggagagaagaagagttcacttgcagatgactgatggatgctccaaatatggtataaagaactacatgatcaagaactttcctatgtgaaaagtcgggtggaaaaaggagaaatctgaaagaaggaaccaaaagaaggaacacgttcatgacaagaagaactacatcaaaaggtcatccaaagcaatggttactacttggaaagatagttcagatgaagacactaatgataatgctgaacgagctctcatagcaattcaagaatctgaagatgaacctgatcaagaatatgagataagttttctagaccttaaggataaaattaaactcctttctaaagatagactattagaattgttgctaactttaattgatgaatccatgaatattgaaaaagaacagttgtcaaaagagtgtaactttttaaaagcaaaatgcaaaaacctggaaataaacatttgtaaaactaaaaaggaaaataatactttgaagaaccaggttcatgcacttgatacatctgtcttagaacttagatctgagaatctaaaattgaagttaggaacaggtaaagaaatagctagtgacacataactctcactagaaaaggatctaggaaaggtaaaagatgagctttataaaagagatgaactggtaagaaccctgaaggaggacttgactaaggttaagcatgagttagatagaacatgtaaaaggaacgtgtcctctgatgaactttcatgggtacaaaaataccatagtagcaacagaaagggacttggctttggaaattctgcacctaaatgggatcccaaaaataagcacctaacattccctgagaataagatttgcacacactgtgaaaacactggtcaagttgggcttaaaataaaaggaaggtcaaaagaataaaaaaattgttctaggaaaaataggctgccaaattgggctaaaaagaacttaatttttccttttgcctatagaaagggacccaaactagcttgggttcctaagactaacctctaatttttttttgcaggtccaagtgggagagagcaaccaaaagtgatatatgataaaaggttgatcaaaacacataataggaaataataaaaggttcctttcacttttggcctttaaatgaggtaatgtctcctttgaaaatggaaatcaaggtaaaatcattggagttggaaagtcttgcagggaagaagagtgatcaatatatatatagtggatctatccacactttccgataatgaactcacttgcttgagtgtcctggacagtgatcccctcatttggcataagaaacttggacatgctagtctaacaactcaacaaactagtctccaaggacttggtgatagggttgcctaacattaagttcgaggaagataaagtttgtgaggcttgtgcaagggggaagcaggtaagatcttctttaaaaagcaagaaaatggtaagcaccaccagaacgatagaactggtccatatggatctttgtggaccaatgagaacattgaccagatatggtaagagatatgttatggtgcttgttgatgattactctcggtttacttggacactgttttttaatatctagagatgaagcatttgacatgatcacttcatttgttagaaaaacttagaaagaactaggtaattaacttgcatcaattaggtctggacatggtactgaatttgagaatgttaaatttgttgaattgtgcgatgagcatggcataggtcataacttttctgcccctaggactccacatcaaaatggagtagttgaaagaaaaataggaattagaggaaatggctaggactatgctacttgctagtaaattgcctcaaagcttctcgacggacgctgtgaacactgcatggtacatcataaatagttgcatgactagacctcttgttaagaagattccctatgagtcacttaaagagagaaagataaatatatcccatcttagggcatttagatgcaggtactttgttcttaataatgaaaaagattccctaagaatgtttgatcccagaagtgatgagggagtattcttgggatattcttcacatagtaaagcttataagatatacgataaaagaactatgtgtgtagaaaaaagtgtatctgttatttttttttaaaactaatattctttctaagaggcaggaacaagataatgaagagattgggctaataaaaaattcaaatagtgaaaccacagtccatcctgaagatgcatcacatgaaggaataggtgatggaataggtcattccacccatggcaacatgacagggagaactaactagagaggaactgatcctcaaacctcgagggaacctgtccatgaacctattcctcagtaacaaaaccaggaaggaacatccaaagaaattgacactcatattgaaacatccatgaatttggatataaatgaacctagttcatctattgatcaaaagttttataggtaaatgattggttctctattatatctcactactagcagacctgatattcttttcagtataggactttgtgattgatttctggcaaatccaaaggagtcgcacttgactgatgttaagaggatcttgagatacttgaaaggcactactggcctttgtcttcggtatccagaagatagtaacttcaacatagtgggatatgttgatgctaattatgcaagttttcttatgtatagaaagagaaacctaggtatgtcatactttcttggctcatgtcttgtgtcttggactaccaaaaagaaaaattttgtggccttatctactgctgaagttaagtatgttgttgctgcctcatgttgtgctcaattgttacggatcaaacaacaattaatggattttggaatttatgaaggttgtatccctatattctgtgataacactagtgcaattagtatgaccaagaacctggttcatcaaaagggaactaagcatatagatgttaggcaatacattttgaggggcaactatgagaagggtttgatcactatagaattttgtgctactgacaagaaaatagctggcatcttcacaaaagctgtaagtatagatcactttgaaagaaacaagttaatattagggatgattaagatcacctaaaaggaaccagttctaactcaaaaatttgttagaaaattgtgaatttttgtacataattagattagattttgctcagtctcatactaccataagtatactcttgtgccatatgataacatgactcattaatatatataatgatattatctctattttcttggaaaattcatactcacacaagagatttttcagtgaagaacctagttcatcaagattatttggtacgtattctccattctgcatagtttgaaataattatattggatcatgattaagagaagagtcacattcaatctcaaaacccattgtacgtatccattataaaaatggaccagtttcgttcaaaagaggagtccaaaccgcattaagtgcctagattctagggaacctctctaacatcttttcaaaacagaaatgcagtttgattagacctctgaaaaggctgtcatcactcaattgaactcctccactttatattgataaggctttacttgtttcttgacttctaaatcttcaagccgtcaaaattctctccaacttctctcatcttccaaacacgctcaaacctccttttctttctccctagcgtagaaatggctaacacctttgataatccctaatcaccaccaaaggaawtttctttctccctagcgtagaaatggctaacacctttgataatccctaatcaccaccaaaggaaacctcaccctcaccatctgatacacattcaactactcccatctctaagaaataaagggtaaaaatgatggctcgtaaggttgttgctggtggagaggaaatcaagaaaataaatgaaaaattgaaagcaagtaaggaagaagaacccaaaaatccgatgagtcattcaagtctacaactgagggggaagaaatggtttcttttgagtctaaacatgtaacgtctggccccaaagttaatcctgaaactatttctaaggttgctacaaatttagagaataggtttgttctagtaggatcgatagcagtattgaaattactgagtctggaaaggtgggtggtaaaaataaaagagaaaagaaaaagagagagagggtgattgaaatactgtgagggtaatgggaaaaggagtggccgaatcttcacctactcttgttgtccttactaaagaatcaagtgatgtggtagtctggggtgaataatctgatggagaaaagcagagtgtgagagtaacaggggaaagtgggtctagagaagttgttgaggggttggttaggctaagaaaaaatgttgaagaacttgttccatctgaacagaaaaccctcagacctactaaaaagggtgactgacagttacaatcccaagaagaaaggaagttcaggagctaaaactcttggcattgctagggaaaacaagaaaaggaaggctgccccttctgttatttctgttattatcccacaagaggcagagccacaagaagccagaaaaagcagaatgaggcagaactggagaaagccttggaaaaaagtagaagaaaagtagttgctaagggaaagaagaagatgagtgagaccgttgagactgttgatattgatgagatggacctagtccgtcgagatgaagataagacagaagaagtggaggttatgactcctaaaccagagaaagccaagccttccacaaaaaagtctatttcatagtcaaagtttgcagaaccatccactttagcaaagagaaccaggtctgctgtaaaatcaagaaaagtgaaaattgtagaggaagaagaatggagtggggaggaagaagaagatgattctgatattgtgaaagacaagctggccaagtttggcaagagaactaccttgaaaggcagacttctcaggaacttagaggaggaaggaattttgctgcttttggaaaagttacaattacaaggctagaataacatggtccttcagatggatggcaggtttgccagaactaaaattattgagtttatgcccaattgtgaggtaaaagatggaagggtcaccagtacagtgaaaggagtgaaagtcgcttttaatttaaaaggagctgggtgagattttaggtgtaactgttgaagggtacagtgactataagaagctcaagtggccaagcctagaaaatctccctattgcccttgccattaccagaaaattcagtgacaataagagagaaaattgagcccaaggttgtgtaaaagagtgagatgaagccaccccacaaagtgatgttcaaatttgtcaacaaatgtattctgccaaggtaggaaatgaggcacattgcaaacttcatggacttggtcctgatggaatgtttggatagtgggaggcagattaattggcctggatttattatccaacttattgatagggttataaatggcaccaaaactcatgcaattccctatggcttcattctcacaactgtgcttgcacatttcaaggtacctatgaagagtgggaggttagtacaagaaaggatcattttggtgcaaatactctgctttcttgtgactacgaagtccatgccactcctaaagaacttggttcatccaacaaggtaccagtgaatagtaaggtgtgggccttggtacaagaaaatgggctaaggatgctgagattgaaaggctgaagaagaggttggcagaggtggagaatgagagagatgctctcagaattgagctggcaagagaaaaaaagaagaatgatggcattcttcaagaagtgctgaaactcctccaagccaaaaaccaagcacatggtccttcccagccttaagcctcctagcctagtgtagatcaaccagtgacctagctcgggatttcttttgtttcttttgcccatgatccagtgtttatatttctttttatgctttgtagtaggatcttatcaatcaatgaaattcactgccttttgctctaactgtttgttgatatttcttagatgactaatatccttagattgatagatggtgcttaaatccatgattgtatttgaagtagccccagtggccatgagtaatttttattaaaatctggttatctaacataattatgcaacttttcgatgatgccagaagggagaattaggttgtgcttttactttaaactgtgatgtttataacctaatgaaccccgtcgttgataatttatgtctttaaaatggaaagttttccaacagtgtattgatgttgagctgagttaaaacaggtttcatgcttatgaagcacggagtttgtcatcatcaaaaaggggggaatttattagcttgagtaagtttgttttgatgattgacaaaggaacacatgcatataaccaggtccatggacagtgtacacagatgacggacagaatcaaacaaaagacttgcacataaaagggataagtataagtggttatatctgatattccttgaacgaaaatgttgcatacttgataaggaccaggactacttactcgaagagaactctatccaatataagagaagaattataagttgaagttgactagaactcttttaccaaggaagagtaaagcattagaactctagttaatctttatttactaattctataaatattagtgttgttttcttttacaggtgatacacacatacttaagtaaaaagtacaaattgagagcaaaatagcaaggcattttgtgagcaattcctgtgagatttatgagtgcgatcttgatgctacacgaaccagattgaagaaccagctccataaagagttttatatgtctttctttatttctagttcaaagtgtagtaggcgttttaagttatacctttcagttttctaagaagcaaattatactaggtacctgagttgtatctttcaagttagagttaatttgaagtagtcgcaacagcctgtggctggttgctataagggttggagttaatccgtaagtttgcaagagtttgtaaactttgttgttggctcagagttatagtgaagtgtttggagaaaatcctattgggtagtaggtcgtgattttttcaccttttgagtcgtgtgttttccatgtaaaaatccttatattctttactttctacatttattattccataatatagtataagcaatacatagaagaacatggttcttttataatacgtgcacgtgaaaaattggacacccctcttgtgtggtattgaagtataaaataacacaaaggttactcgcaaatcgacccaatgcatcgggaacaagcatcgtcataacgtatgacgtcactccctctcttggaccagattgctccaacaaatcacccgggaaatttaagggatttgaaatacgcagcccacagagagccacattgcctgctctctataacgactatgacccatgttatctcttcgacaagcccgaccatgaacgacattatccgctcattgagcgcgcccgcgaagacgacctcaagaagcggaggaactaactgtatgggcaaaaaattatcatagttgtatttagattacgtcaacattaagagggccttcgaaggctatcacgtgtcatcagtgtgacttcaataatagacagattcaaggctgaagtgatttgacaagagatgaagtgctaggtcgaggagtcaacagagatcaaggtcgaggacgtgcagtatccttaaattaagtaataacggccagttttaggataagactttaaagagaatatttcagtgaatattctctcgatctgtattattagggttttgtcacacatgtccccttataaatagaaagagacatagttataggggatattgaacactcatttggaaaacaacaacacctttctttgtgattcttgctttatcacatatatacaaaatacaccttttcttgagatcattgtctagcttttctcttacgatccaaggagaatctgaatattcaaaggcttatcaatcatttatcattgtcaaaaggaatattacacggcttcatctcctttttcgttcatctctgtaacatatatttatataaataccattatacatcatttattgctatcgaatgctattcacttcacatttgtgtcattaagtgttgtattattgcatatttaccactgttaccgtagatctcgtaacactttgttgcggcactagttaaacaatctagtggatattataattggctaagattaaccctaccttattaaaaaaatctaattatttaaacctagatctaaattttgggcaaatattaatactaataaaatacttgcacctccagtaatgagttggattatcatgtgcttcctttattttggtatgatcattcaggcgacaacagcaaaataaaaatacaagtgaaaggtttcgtattttaacaatgttaaaaatgataaacttcttcatcaagtctgaagtctcagagtttggttttcgtgctctttaatttcttgcttctattttaccgacagataggatttaaaaaatatacacatccagtattaattggagttgaagtcttgaagattcctcttctctcttgtattattaccagtcatataaaacgacaagagttgcatatgtatgtatgtagtgttgggagttgacctcgatgctttctttcttgcgaggtgctattcgttgatatatcatcacaaaggacaagacttgctggaaatcatgtgtaactcccgcttttctggtgttatgaataaattaaaaacttagcacatcaaatggttggagaagacttctttgttctcttaggatgcactccctccctcccatttcatatgattgtgattcggagtacaaggatgaagctatctactttttgtgtgaatgtgaacaaagaattttcaaataatttgaaatatcatttacatatttaaaagctacgcaaaataatactataaatcatagtaacaagtaacatttcaaaatatttaatagacatgtgaaaacatgaggtcaaagaaaaactcctttgatatcccatgtgaatgttgagatccacatttatttcttcatgtgtcgcgttccttgaaaaatacattgctataccttctaccaagatcgagtccttggttctactaatttttaggatccgtttggatatagattccccaatatttttgttatgatccgaaattctcaccttcggaagtcgtgatggcgcctactagtagaagctaggcaagccacgaacttagaaatctttaactcttctgttttaatcttttttttttcttttttacaacttatattaacaagtgataaacatctaaatggcagcagaatatgagatttaagtgaaagacttaaataaatataaaaccaaaatgtttcgaaagtcaacacatgcctctacccagaaactggtgtcacaatatccacagactattaagagtactacatacaacggtttgaagcaagaataacattgtttgcctcggatacatgagataacaaaacataataaaagataaaggagacgtcgggcctgcggacgcctgcaaggctacctcgatgtctcggtggactgaaggttggctcccctactgctgctgatcaagtgccgctccggtatctgcacaaagtgcatagtgtagtatcagcacaaccgaccccatgtgctggtaagtgcctggcctaaccccggcgaggtagtgaccaagctaggaccagactccagataaacctgtgcagttatataatatatggcggaaaataaacatgaataagaagtttaaaattggagggggaaacatgcttcggggaaacatatcaattctatcagaaacttaataaactatgaaagaacactcgatgtctacaatcaatacgataacaatactgttgcggcgcgcaacacgatcctttatcatttaacattgttgcggcgtgcaacccgatccacatatataactgttgcggcgtgcaacccgatccaatataatatctgttgcggcgtgcaacccgatccaatataatatctattgcggcgtgcaacctaatccacatatataactgttgtggcgcgcaacccgttccagatatacagtcaacaataatcataattaaccgccccgacaagggatcaataatagactacactatccggcaaaggaactcaacagtacaagtatatacgtcccgataagggagtaaccgccataaccaaacttgttccaacatctaactatctcaactataactcagctagtttcaacatccaactaccccagctataactaaacttgttacaactcctaacacgaagaatcatcaacctaagcgtccgtaatatcaattaagaacacaatgcaagggaacatcaactcaacaatagcccggcaaggggggcaacataatgatctctactctttctcacttttacctcacaattaacttcacaactcgagccaatgctctagagtttcgattatcactgagcccacgctccttaatgttcataggtcacaattctttccacaactttacacaataaatagaaatcttcaccaaggcacgaataatacaacgagatcatgaaaatcacagtataagactcacggtcatgcttgacaccaacgcatagatactcgtcaccatgcctatacgtcgtactcgacaagaaacaaatagcaaataggacacaactcctaatccctcaagctaaggttagaccaaacacttacctcgatgccacaaacacaactcaaggttcaattatagctttaccccttgattccaccgccaattcgctcgtatctactcacaaattacttaattacatcactaaccgctaaatgaatcaattctaatgcatgaaaataggttttaccaagatttccccaaaaattcaaaaattgcccccgggcccacatggtcaaaacccgaggttccaaccaaaacccgattacccattcccccacgagctcaaatatataatttgttttgaaatcggatctcaaatcgaggtccaaatccccattttttgaaaaatataggttttacccaaaacactcgatttcccccatgaaaattattgatttgaagttgaaatcatgttaaaagatattagtgattgaagacaattagttaaaaatgacttacattgatttggagaagaaagagtgtttgaaaaatcacctcttatgtttttggggtttttgaaaagtgcaaaatgactgatagtctcgtctatttatacccctctcagaccctctccgcggaccgcataaaaaggactgcgtccgcggagctccaccgcggactgcgagacctggcttcagagacctgcaacttctctgaatctgcaactttttcctaagtgtaaaaacatcccgaaactcacccgagccctcagggctccaaaccaaatgtcatactaactcaaaaatatcatatggacttactcgtataatcaaatcctcaaaataacctcatgaacatcaaattaaatctcgagatcaatgaaattttctccaaaacttctttaaacataaattttgcaatttaagtccaaatcacgtcatatgacatctgtttttcaccaaattccacagaaaggtcttaaaccatatataagatctgtaccgagcaccgaaacacaaattcggtcccgataccatcatgttctaatcaaattccatttcaaatttctttaaacaattccagaaaataatttcctttaaaaattcatttctcaggcttgggacctcggaattcgattctgggcatacacccaagtcccatattttcctacggatcctccaggaccttcaaatcacgggtccgagtctgtttacccaaatgttgaccgaagtcaaatttatttattttacagtcaaaacttatcatttttcacagattatcatatttaagttgtctggctacgcgcccggactgcgcatgcaactcgaggtgactctaaataaggttttcaaggcctcagaacatggaagtttcatattaaaacaagttatgaccttttgggtcatcacattctccacttctaaaataatcgttcctcctcgaacggacagtacctgaaggaagtacctgagtcgggaaaaagatggggataatggctccgcatatcggactccgactcccaggtcgatgcctccgtaggctgatctctccattgaacatgaacagaaggaaaactcttcgatctcaactaacgaatctgcaggtctagaatagccaccggcttctcctcatacgacaagtccctgccaactgaatagtgttgaagtctaacacgtgatatggatcgccgtgatacttacgaagcatggacatgtgaaacactagatgcacggttgaaaagctcgacagcaatgcaagtctataagccacctctcccactcgatcgggaatctcaaacggaccaatgaacctagggctaagcttgccctttttcccaaatctcatcactcccttcataggaaacactcggagcaatacccgctcaccgaccataaatgccacatctcaaacctttcgttctgcataacctttttgcctggactgagctgtacgaagcctatcctgaataatcctaacattgtccaaggcctcctgaacaaagatctgtacccaacaaccgagcctctcccggctcaaaccatcatatcggagaccggcactgcctaccatataaagcctcataaggagctatctggatactcgactggtagctgttgttgtaggcgaactctgctaaaggcaaaaactgatcccacgagcctccaaagtcaatacacaagctcagagcatatcctccaaagtcgtacttaacctgctgacaattcaaacaccgagctacatatgcaatgatatccttcttcattctctgccaccaataatgctgccgcaaatcctgatacatcttcgcggcgcccggatgaatagactatcgggaactatgggcctcctctaagatcaactctcggagtccatccacattaggcacataaacttgtccctacaatctcaaaactccatcatcatctaaggtaacctgcttggcacctccatgctgcaccgtctctaaggaacacacaaatggggatcatcatactgccgattacggatacgctccaataaagaagaacaagcggctgtgcaagctagcacatggctgggctcagagacatccaacctcatgaattgattggccaaatcccgaacatccaaagcaagcggtctctcaccgcccggaatataagcaagattgcccatactggatgacttcctactcaatgcatcggccaccacattggcctttcccggatgatatawratagtgatatcataatctttcaacaactctaaccacctcctctgtctcaaattcaactcctgttgcttgaacaaatactgaagactcttgtgatccgtgaacacctcacatgccacgccatacagataatgtctccaaattttcaatgcgtaaacaatggctgccaactccaaatcatggaccgggtagttcttctcatgaatcttcaactgccgcaaagcataagcaatgaccttgccatcctgcatcaacactgcaccaagttcaatacgatatgcatcacaatagactgtataaggccctgaatctgtgggcaaaattaacactggtgtcgtattcagagctgtcttgggcttctgaaagctcgcctcacactcgtccaaccatctgaattgggcacccttctaggttaatctagtcattggggctgcgatagatgaaaacccctccacgaaccgacgatattagcctaccaatcccaagaaactctgaatctgtgtagctgatgctggtctaggccagaaatgcaactaaactcaaccagaactcacacttcgagaacttagcatataaccggttatccctcaaggtctgatgaaccactctaagatgctactcgtggtcctcccagctacaagaatatatcaaaatatcatcaatgaagactatcacaaacgagtccaaataaggcctaaacacgcggttcatcaaatccataaaagctgttggggcattgatcaacccaaatgacatgaccaagaactcataatgcccataccgagtgtggaaagctgtcttagggacatcggatgccctaatcctgaactgatgatagccagatctcaaatcaatctttgagaacaccttggcaccctgaagctgataaaacaaatcatcgatcctcggcaatggatacttattcttgattgtaaccttgttcaactgccggtaatcaatatacattctcattaatccgtccttcttcttaacaaacaacaccggcgcaccccaaggtgaaacaagggtctaatgaaacccttctcaagtaggtgttgcaacttatccttcaactctttcaactcagacggagccatacgatacggcggaatagaaacgggctgagtgcccagatccaaatcaatgcaaatgtcaatatccctatcgggtgtcatacctggcaggtctgaagtgaaaacctcaggaaactcatgaacaacgggtacagaatcaatagagggaacctcggcactagaatcacgaacatatgccaaataggacaaataccccttctcgaccatacgccaagccttcacataagagataaacctacgggtagaatgactaggagtacctctccactctaaacgaggtaaacccgataaggctaaggtcacagtcttggcatgatagtctaagatagcgtggtaaggtgataaccagtccatccccaatataacatagaaatcgaccatgtccagaagcaacagatctacacgagtctcaagaccctcaatcacaactataaaagagcgatggactcgatctaccataatagaatcacccaccggtgtagacacatatacaggaacactcaatgaatcactaggcatgtccagatacggtgcaaaataagatgacacatacgagtacgtagaccctggatcaaataacactaaagcatctctatcacaaacaagaaccgtacctgtaataactacatctaaagcctcagcctcgggcttggctggaagagcataacatcagggatgggccccaccaccctggactacatttctgggacggcctgtagctggctggcctccacctctagcggtctgagctccacctctaaatcctctacctccacatctagaacctctagctggctgggtggtctgtggaaaacctggtgccccaaccatagcgcggaaaccctgctgctgcgactgagtacccactaacctcggacaagtcctcctaatataaccatactcaccacactcaaaacatccacctaagtgttgtggctgaggaaactgagactgaccctggcgacctgaataaccaccccgaaaactctggagcagcagtgcactgataggagctggtggtgcactgtaggactgctgatcagaatattgcatctgcggactacggctacctgaagcaccgtgagaaacctgaagagctgactgaatacaacccgatctaaaatactcggtatttatggactagtgccatacgaggtaccacatgactacgacataaggtatatataaagtatattaaaaatgagtagtattttaaagtaatttgagacatttcttaattatgcaaataattgattaattaccgggtaatagaacgttacctaattactggataaagattaagctttcccaccctaaaacgtggcagcaagactagctctaaattgtgactcttaatgtcacatattaaggtgtcaaaacttagtaagatttgtggccaagtcactaaattagtggggcctacagcattaaaacataagacctctctaaaaagagttgcttatataaaaaatggtaggcaatttgccttagtaacgtgactggcattctgtttcaataaattcaagcaagcatatcttagaaatgtgatatttttgaaattctaacgaagcctggtataatttttctcaagaatatcatacggatttttctctacttcaatctgtcattacatgtttttcacataagacgtgtgttagaagaattgttaagagaatcggtccgggtatgttaagactatcccttatttcttttggcatgatctatacgtcacaaacgaaacgagtaaatgcacaatttcaataaatgactctaatcatagaaatactaggggtgtctatattcttgattcccaatgtagattattattatatcttctattcacggtctcagaaaaatacgtatttgataaagtttatccgaaaggcatatgaatttttatggcattctgagaaaatcttattgacatattttcttatgcatttcatgcatttatacatgtacattgacccatgactagatggcgttatatatgcatatatatgtatattatatgtatatgggatatgggaaaaggttacgatattgtatacgcaccaccacctgatcagctggtatacgttgatgattttgcccatagtggacgagatgatatgatgggatgccctcagaggcttgatgatgttatgaacacatgtacctatacacgacatgacattcatacatatatgcatgacactaaaagtatttcataatttacagagttatccagacttacaggttgagtcatttactttatatttcttccatgtcttttacgtacttatttatgtgccttacatactcggtacattattcgtattgacgttccttttgcttgaggactctgcatttcatgtccgcaggtctcgatagataggtcaagagtcctctaagtaggcgatcaactcagcggaagatgttggtgctctccatttgctccggagttgcttgtttggtcagtatgatttatatgtgtattgtttggtatggagggttctgtccctacctttataacaattatgtatccttagaggcttgtagacaaatatcatgtatgtaagagattgtatggccttgacaacctatgttcagtgcacgagtgattattttggtcttagaggctcatatgtcttatgtataagttggtattacatattgtattctacctatttcacggtggcctctccgacccagttatctatgatagtatgatatgaaaagatacattatgttggtactcggttgagtaagatatcgggtgcccgtcacgaaccatcgattttggtcgtgacataattacttctataaacaaacatatatttgaattttttatttttaaaaaaaacttccaaaacttatggccaaacgcctacttaaacttacttatgcttttggcctttgaataaagttagaaaatccatttgtgtattccttgaaagcgagccatgcattgtcgagtcaacttaccagcaaatacttcttgtaagatttaatttttcatataacattttcctttttcttttccttttttttttgtctttttctttgcatgcatgtcatcaggcccagctggcgcctaaggccactaaggcaatggccttaagcccccaaaatacttacggccccaaaatataaaaataatatatatatataatattttgataattatatactattgttagaaattttaaatcatttggttaaaatagttatagctaaaagttttacaaatattaaatttcagttactagttattttctgtctttaattcgtcccaacttaagttgatcttcttacaatgttagtttagaacagtttttcttaattctttgagtgcatttgtagacatttttcaagctactttgattagtaactattaaaatttgtccttaacattaattgactcttgaaacatagtagttactataatattatttgtttcaacttatatttagatttaaaagtgctaagagaaactgtatacgtagaagaatactctaatgggtaaacttaatcagctaaaaagtgttaattcaatattgttaattaacaaattaacttgagatttttaaattaaaataggttggatttttctatatcagttgtctcggttgaaaaagtttttaaaaactaagtcaataaagttcaacaaaataatacaagagagattaaacaaattggttagacattggcaataattaaaactgattataaatttcgataaattataagagagaaaaaaattaaggcctcacttttaattttcgccttaggcctcatattatgtcgatccgccccagcatgtcattatttatagaatatatgccaaaacaataaagtttatatacaatacaggtatgtgttaaaactgatgatcggtcctaaactatatgcacaaaatttaaaaaatgagattatgtgagcagaagggacctacatatatatatatatatacttacggataccctgaacatatccaccattagtggatcatcggataatgacattggactaataaagctcagttagcccatttgttttgaaaatcattgggttgtgtttcattgtagaggaattttcaaaaagtattatagtttagagtccaattattaacatagttatagttggcctaattatcattcgtaggtaatgtatttcaatttcgctgtatcaaacgcatacaaccaaattcaaattttgttgtatcaattcattgtcaggctgcatcaataaataccgttttgatggaaaagttgtattaactatattaattcgtgaataacggttgtatcaatgaatataattttgatggaaagcgatatcaattagaggcagaactaggtgtcggcccaagaaaaggtttgttttgaagattgacaaatgaagatcaggcatgaaccaggtccatcccttgtgagcatagacacgggcagattcgagcatatgggatgcacgtgacgaagataagcttaacttggtatatttgatatctccttatcgaaaaggttgcataattaataaggagaaggactccttacttaaagtgaatactatccaaaataaggaaggagctagaggttgaaggtaactagaacttttccactaaagaagagtagcattagaactctagttattttctactctactaactctataaatcacaggatattctcactttacaggtgatgcacacatactgaagttaagagcaaattgagagcaaaatagcaaggcattttgtgagcaactcctgtgagttttaagagtgtgatcctgaagctacacgaaccagattgaagaaccaactccataaagagttttatgtgtctttctttatttctagttcaaagtgtagtatgtgttttgagttgtacctttcagctttcttagaagcaaattgtactaggtgcttgagttgtatcattcaagttagagttaatgtgaagtagccgcaacggcctgtggcgggttgctataatgattagagttaatctttaggtttgcaagaggttgtaaactcgatttttattattcatgttagagttaacatgaagcaatcgcaacagcctagggctggttgctataagggctagagttaatccttaggtttgcaagagtttgtaaactttgttgttggctctgagttgtagtgaagtgtttggagaaaatcctactaggtagcaggttgtgggttttttacattttaagcgggtgttttctacgtaaaaatccttgtgttatttactttctacatttattattctgcaactgtagtataaggaacacatagaagaaccaggttcttctataatttgtgcacaaaaaaaattggacaccacacaaatcaccccatcccctctcttatgtggtattgaagtaaaaaatatcaattggtatcagagcagattatacttgaagaggcaaataccttaggaaaagatcaagatgagtgcactatctgaaaactctaaagagcaatctaccactaggccaccactattcaatgatcactattattttttgtggaaggagaggagaagagatcacttgcagatgactgatggatgcttcaaatgtggtaaaaaaaaccacatgatcaagaactgtcctatatggaaagtcgagtgaaaaaaagagaaatatgaaataaggaacaggttcatgacaagaagaactacaacaaaaggtcatctaaagcaatggttgctacttggaaagatagttcagatgaagacattgatgataatgttgaacgagctctcatagcaattcaagaatttgaaaatgaacctgatcaagaatatgagataagttttctggaccttaagaataaaattaaactcctttctaaagatagactatcaaaattgtttctaactttaattgatgaatctaagaatataagttatgaaaaagaacagttatcaaaagagggtaactatttaaaaacaaaatgcaaaagcctgaaaataaacatttgtaaaacttaaaaggaaaatactgctttgaagaaccaggttcatgcacttgatacatttgtcttagaacttatatctgagaatctgaaattgaagttaggaacaggtaaagaaatagccagtgacacacaactctcactagaaaaggatctaggaaaggtaaaagatgagctttataaaagggatgaactggtaagaaccttgaaggatgacttgactaagattaagcataagttagatagaacatgtaaatggaacagatcctttgatgcactttcatgactacaagaataccatagtagcaatagaaagggacttagcattgggaactctgcacctaaatgggatcccaaaaataagtacctaatattccctgagaataagatttgcacacactgtagaaacacgggtcactacaagagtgattgcattacaaaagaaaaggcagatcaaaagaataaaaattttattctagggaaaaatgttgccaagttgggctaaaaagaatttaatttatccttttgcctatagaaagggacccaaactagtttgggttcctacgactaacctctgatattcttttataggtccaagtgataaagagcaaccaaaaataatatatgataaaaggttgctcaaaacacatgacaggaaattagaaaatgttccattcacttgtggcctttaaaagaggtaatgtctcctctgaaaagagaaagcaaggtaaaatcattggagtcggaaagtcttgccaggaagaagagtgaaaaatatatatgttgtagatctgtccatacttttcgataatgaactcactttcttgagtgtcctggacagtgatccccttcttttgcataagagacttagacatgataatctaagttgactcaacaaactagtcttcaagaacttggtaatagggctgcctaaaattaagttcgaggaagataaagtttgtgaggcttgtacaagggagaagcaggtaagatcttctttcaaaagcaagaaaatggtaagcaccaccagaacgatggaactggcccatatggatttttggggacgaatgagaacattgagcagaggtggtaagagatatgttatggtatatgttgatgattactctaggtttacttgtacactgtttttaacatctagagatgaagtatttgacatgttcacttcatttttttttagaaaaactcagaaaaatctagataatcaacttgcatcaattaggtctgatcatgatactgaatttgagaatgttacagaagttatgaataatgcatgctacgtcataaatagttgcataactagacctcttgttaagaaggcttcccatgagatatttaaagggataaagccaaatatatatcctactttagggcatttggatgtaagtgctctgcgcacaataatgtaaaagactccctaggtaagtttgatcccagaagtgatgagagagtatttttgggatattcttcacatagtaaagcttataagatatataaaaaagaactatgtatgtaaaagaaagtgtgtatgttatttttgaaactaaaattctttccgagaagcaggaacaagatgatgaagatattggactgacaagaaactcaaatgatgaagccacagtctagcctgaagctgcatcacaggaagaaataggtgatggaatgggggtttccaccgtgggcaacctgacaaggcgaagtgactagagaggaactaatcctcaaacctcgagggaacttgtccatgaacctattccttagtaacaaaaccagaaaggaacatccaaagaaattaacactcctattgcaacatccactaaattggatatagatgaacctcgttcatctgttgaccagaagttgtatagaggaatgattggctctttgttatatctcactaccagcaggcctgacattgtttttagcgtaggcctttgtgctcgatttcaggaaaatccaaaggagtctcacttgactgccatcaagaaagtcttgagatacttgaaaggcaccactaacctttgtctatggtatccaaaaggtagtaatttcaacttagtgggatatgttgatgctgattatgtaggttttcttgtgaatagaaagagcacctcaggtatggaacactttcttggctcatgtcttgtgtcttgggctactaaaaagtaaaattctgtagcgctatctactggcgaatatgagtatgttgttggtgcctcatattgtgcttaattattatggatcaaacaacaattaatggatgttggaattgatataggttgtatccctatattctgtgatatcactagtgccattagtgtgaccaagaatccggttcatcataatagaactaagcaaatatatgttaggcatcattttttgagggacaactatgagaaggggttgattactatggaattttgtgctactgacaagaaaatagctgacatcttcacaaaagctctaagtagagatcactttgaaaggaacatgttagaattagggatgattaagatcacctaaaaggaacctgtcacgaccctaaatccggacccggtcgtgatggcacctctcatgaagacaaggccagccgacactttcttatttcagttttaagcaattaaacaataagaactaaatctaaaacgtaataaataatcccaaagtaagcagtgaatagtacaatgtagaagtaaaaccaacacagcccgataccggggtgtcactagtcatgagcatctacaatccggatgatacaagaaaggtctatatagtctaatacaaatttaaaacagaggaagataagataaaggaagaagctctaggatgcgaacgccgacaactacctagagaatcttcgaatccgcctgagctggaaaagatcaacactcgttagcgggacctgatgcgcttgaatctgcacacgggttgcatggagtaaagtgagtactccaactcagtgtgtaataatcataaataaagactgaaagtaagaaatcacataaggcacattataggctataaggaagtagtaaaagctagtaaaacagtgaagcagtaaagctgtataaaattaccgagttcagtttaaaacttcataaaatgcctttttaacaattaagcaagcaaatgacaggaaattaggaaagataaacatataaaggatcgcccctctggcacagtgtcaacaaatccaccctcgggcaatatctcagaaacaatactagcccctcgggctatatcttacatcacaatgggtacccgcgctcactaggtatgtgcagactcctggaggggctccttaaggaccaaccgcaatatcaagcactcttgtggcatcatcactaggccctcggccttatatcaacaagccaccttgtggcttacaaatctcaggccctcggcctcataatcataatcaggtgtttcctcacaacataggccctcggccttactcagtcaaaattatttcaagccactcgggcaatagtaaaacatgatgcttaactcaaaagatcatttaaaatctcatttaagtgttaaagtagagtaaacacgactgagttatgaaaacagtagaatatagcgtgactaggttcaagtataaagtcaaaacagtgagaaaatatcagtaaaaatcccataagtgttcaaatagttggcacgaggcccaattatggcattcagcccaaaacatgatgataacaaacagtttttagtcaaatacgtggtaaaatagtcattcgggacggactaagtcacaatccctaacagtgcacgaccccatgctcatcatctagcgtgtgcgtcacctcaatatggtataacgatgtgcaatccggggtttcataccctcatgacatcatttacaattattactcacctcaatctagtccaaatctagcccgcaacgcctttgcccctcgaatcgtcctccgctcgcgtcgaatctatccaaaatcagaatcatgatgtcaaaatatgctaagggaatgaagcccatacgaaaataatcaatatacaacacaaatcccaaaattaccaaaatccgacccccgggcccacgtctcggaattcgatgaaatttacatcaataggttccttacaatccccacgagttcatacatatcaaaagtaccaaaatccgaccacaaatagtccctaaaaccctcaagtctaggtctccaatacaagccctagtttccctaattttaacccttaaattccattaattacggctctaattcgtgaaataataccataggaacgagttttaggtccaaaatccttacctcaatgaagttcccttgaaatcattcttcaaaatcgtccaaaaagctccaaagcctacttagaaatggtggaatagctcaaaaatcacgaaggaaacaatttatatgttctggcccagggatttcgcatctgcggccaaattcccgcttctgcggtattgcttctgcgctcaagaccaccgcatctgcggtcctcacttaagtcctcattttcgcatctgcaattcactatccgtgcctgcgccatcgcaggtgtggttctccaaccgcttctgcggtttctgcctccctatctcctttccacttctgcggccccctttcatcgcatctgcggcatcgcacctgcggtccccaatccgcaggtgcggaaacaacagaagctgaaaatctgcatcttcaccacgaattccaaactctctgtcaaccatccaaaatcaccacgaggcccccgggacctcaaccaaaagcacaaacatatcctataatcttattcaaacttataccaatctttaaaacacctcgaacaacatcgaatcaaccaaaacacatcaaattcaagcctacgtttccaaaaaccttccgaattatgcttttgatcaaaaacccaaccaaaccacgttcgaatgacctgtaattttgcacacacataccaaatgacataatgaaactactgcgactttcggaattccattctgacccctatatcaaaatctcacctatcaatcgaaaaacgccaaaaatccaatttcgctaattcaagcctaaatctactccgaacctccaaaatacatttcgatcacgctcctaagtcccaaatcacctcccgaagctatccaaaccatcgaaactcacaatctgagccctctaacacataagtcaatatccggttgacttttccaacttaagcttactcaaaagagactaagtgtctcaaaccttaccaaatcctttctgaaccccagccaaccaacccgatcacatatagaaccgatagataaagaaataagaagcagaaaatggggaaaatggagtggtaactcaggagatactagtcggatcgttacatcctccctctcttaaataatcgttcatcctcaaacgagttaagaaccatacctgaagcctcaaacaggtgaggatatctgctccgcatctcccgctcagcctgctaggtcgcctcttccacgggctgacctccccactgcactttcactgaagctatatccttagacctcaactttcgaacctgacgacccaaaatagctactggctccacatcatagatcaaatcaccatccaactgaaccgtgctgaaatccataacatgggacggatccccaatatacttttcgagcatagaaacatgaaataccagatgcacactcgacaagctgggtggcaaagcaagctcataagccacctccctaatcctgcaaagcacctcaaaagccccaatgaaccgaggactcaatttacctttcttcccaaatatcataacacccttcatgggcaaaaccttcaacagaaccttctcgccaaccatgtaggacacatctcgaaccttcctgtcagcataacttttttgtctcgactgcgctgtacgaagcctctcctgaatcaccttcaccttttctaaagcatcctgcacccagtctatccccaatagcctagcctcacctagctcaaacgaaccaactggagatctacaccacctctcatacaaagcctcatatggagccgtctgaatactcaactggtttgttgtaataagcaaactctacgagagatggaaactgatcccatgaccctccaaaatcaatgacacaagcacacaacatgtcctccaatatctgaatagtgcgctcggactgcccgtccatctgagggtgaaaagttgtgctcaactcaacctgagtacccaactctcgctgcacaaacctccaaaactgcgaagtaaactgagtgcccctatctgaaatgatggaaactgggacaccatgcaatcgaacaatctcccgaatatagatctctgctagccgctctaaacaataagtagtacacacatgaatgaagtgcgcggacttggtcagccgatccacgatcacccaaatagcatcaaacttcttaaatgtccgtgggagtccaactaaaaagtccatagtgatcctctcccacttttactctggaatatccatccgcggaagcaagccacctggtctctgatgcttatatttcacctgctgacatttgagacaccgagctacaaatcccacaatgtctttcttcattctcctccactaataatgctgtctcagatagtgatacatcttcgcggtacccggatgaatggaataccgcgagctatgggcctcctccagaataaactcccgaaacccatctacattgggcacacatatctggcccatcatcctcaacaccccatcatcaccaatggtcacatctctggtatcatcatgatgaactttgtccctaaggacaagtaaatgaggatcatcatactggcactctctgatgcgatcatataaggaagaccaaaaaaccacacaagccaatacctgattgggctccaaaatatctaacctcacaaactgattggacaaggcctgaacatcaactgcaagaggtctctccccaactggaatatattccaaactccccatactcactgcctttcagctcaaagcatcggccaccacattggccttccccgaatggtacaatatagtaatatcataatcctttagcaactccaaccacctccactaccacaaatttagatccttttgcttgaacaagtgctggagactacgatgatcagtaaacacctcacaagacacaccatacaagtaatgtctccaaatcttcaacgcgtgaactatggcaaccaactccaaatcatgaacggggtagttcttctcatgggacttcaactgacgagaagcataagcaataactctaccctcctacatcaatatacacccaataccaactcttgaagcatcacaatacacggtatataaacctgaagctgatggcaaaactagcattggagtcgtgatcaaggctgtcttgagcttctgaaagctctcctcacactcatttaaccatacaaatgaagcacccttcggagtaaacttggtcaagggcggtgcgatagatgagaatccctgaacaaaccagcgataataacccgccaaaccaagaaatatgcaaatctctatggctgaggacggtctgggccaactctgaaccgcctttatcttcttcgggtcaacctgaataccctcactggacaccacgtgtcccaagaaagccactgaactgagccaaaactcacacttgaagaattttgcataaagtttctcctccctcaatctctgcaacacaactctcaaatgctccatgtgctactcctaactacgcaaatacaccagaatattgtcaatgaagaatttgacaatcgagtctagataagtaaggaacacgttgttcatcaagtacatgaatgctactggggcattggttagcccaaggtgataacctgaacagagatcaatcttgaagaacactctcactccctgaagctggttgaagaaatcatcaatatgaggcaaaggatacttattcttaattgttactttgttcaattgcctataatcaatgcacatccttataatgccatccttcttcgttacaaatagaactagcgcaccccaaggtgacacactaggccaaatgaacctcttatcaaggagttcctgaagttgcttctttaactccttcaaatctgctggtgccatacgatacgacataatagaaatgggctgagtgcccggcaccaggttaataccaaagtcaatatccctgtccggtggcatgcccggtaggtctgcaggaaacacatcatgaaaatccctcacaattagaacgaaatcaatactgggagtctctccaccgacatccctcacaaaggctagatacgaaagacaacacttcccaaccatacgttgagccttcaaaaatgagattactctactgggaacataatcagtcaaaccttgccactcaatctgtggcacacccggtatagccaatgtgactgtcttaacatgatagtccagaatagcatgacttgtagataaccaatccatgcccaaaacgacatcgaaatccaccatacacaataataaaagatctactagggtctccagatccccaatagtcactacagacaaccggtacacattgtctacaataatagtatcgcccatcaggatagatacatgaacaggtgaaacaagagactcacggggcatacccaaataacgagcaaagtatgatgacacataagaaaaggtggaaccaggatcaaataatatagaggcatctctagggcaaactgaaacaatacctataataacagcatcaaaagcaatagcatcgggtctagatggaagtgcatagaaacgggcctgaccgccatctgatcgacctccccctttgggacggcctctagatacctaacctccacccctagctggctgggcaggtgatggtgaagtaactcgtgctgaagccgatgactgactcctctgctgagatgaacccgcaagacgacgaggacactgcctccacatatgacccatctttccacactcatagcaactctcgagtgctggagaaggggactgaagggacccctagcaccggaatgactagtagatgcacctagcatagaagatccctgaactgattgagcacgagataaactctaagctagaaaggcactaagtgatgactggccctgatgagaactgtgagaaccatgactcgatgatgccccatgataacctgggcgagctggctgagcatgcctaaatggatgccctctgccgtgctgaaactgacctctcgaaggagcactactctaactaccagatcctcgaggcctcttggcatccctctcctctcgctcctagcaatgaacaaactcaatctcactagcgatgtctacaacctcctcaaaagtcgcaccagtcacactctccctggtcatgagagtacgaagctgataagtaaggccatcaacaaacctcctactcctctctctatcaatccaaaccaaccaaatagcataacgagctaactcgaagaacctcatctcatactacatcatagtcatctctccctgatgcaaccacttaaactacctacgcagctcctctctatgagactgcagcacatacttctccaaaaagagaacggagaaatgctgctaggtaaggggtgctgcaccaataggcttacgcctctcaaaagtctcccaccaagtgaaggatgttctagaaaactgataagtagtgaaagcgaccacgctggtctccagaatacccgttgtacaaagcatcctctaacacttatccaagaaaccctgggcattctcgccatctgcaccactgaaggtcggaggctgaagccaaccaaacctctccaacctatgttgttcgtcctctagcatagcaggaaccacatagtcctgagcagctataaccggctcggctagatgcatccccggtgtctgaagtccctgcacgacctgctcaagtgtgcaagcggcgggagtttgagtgcctcctctagcctaagaagtagttgtggctgtactgactgaaactgcctgagctaggccagtgcatactgataaaatctgagccaaggcctcctgaagaccctgaatcacaatgggcacaactggtgcctgagctagtgctgctggagcgtccacaactgggacctgatcctgaactagggcgatagaaggattttgcaggtgctgctctagctactatgtgggccacacctatgtccctacggtaaccacgaccgcatcctcggactctagtggccacgctggtggtgctggtggtcgtccatcttgactggtagcgcgtgtcctcaccatctatgagagaatagaataacataagtttagtactcggatcaacaaattcgcaagacaagaatttcaagaatatgaaggtttccctaaagattctacagcctctcgaggataaatacaaatgtctccataccgatccacgagactatactaaacttgctcatgactcgagagacctatgtatcctaggctatgataccaacttgtcacgaccctaaacccggacccggtcgtgatggcacctctcataaagacaagggcatccgacactttcccatttcatttttaagaaattaaacaataagaattaattctaatacttaataaataaacccaaagtaagtagtgaatagtacaatgcagaagtaaaaccaacacaacccgataccggggtgtcactagtcatgagcatctacaatccgtatgatacaagaaaggtctacatagtctaatacaaatttaaaatagaggaagattagataacggaagaagctctaggctgcgaacgccggcagctacctagagaatcttcgaatctgcctgagctggaaaagattaatactcgctagcaggacctgatgcgcctgaatctgcacatggggtgcagggagtaaagtgagtactccaactcagtgagtaacaatcataaataaagactgaaagcaagaaatcatataaggcacattataggctataaggaagcagtaaaagccagtaaaacagtgaagtagtaaagatgtgtaaaattactagttcagtttacaacttcataaagtgcctttttaacaattaagcaagcaaatgacaggcaattaggaatgataaacacataaaggatcgcccctcgggcacagtgtcaacaaatccgcccctcgggcaatatctcaaaaacaatactagccccttgggctatatcttatatcacaatgggtacccgcactcactgggatgtgcagactcctagaggggccccttacggcctaagagtaatatcaagccatctcgtggcatcaccactaggccctcggcctcatatcaacaagccaccttgtggcgtacaaatctcaggccctcggcctcataatcataatcaggtgtttcctcacattataggccctcggccttactcagtcaaaattctcttaggccacacgggaaatagtaaaacatgatgctcagctcaaaagatcatttaaaatctcatttaagtgttaaagtagagtaaacacgactgagttatgaaaatagtagaatatagcatgactgagttcaagtataaagtcaaaacagtgaggaaatatcagtaaaaatcccctaagggttcaaatagttggcacgaggcccaaatatggcattcagcccaaaacataatgatagcaaacaattttcagtcaaatacacggtaaaatagtcattcgggatggactaagtcacaatccccaacaatgcacgaccccacgctcgtcatctagcatgtgcgttacctcaatatggcacaacgatgtgcaatccgggatttcatacgctcaagacatcatttacaatcattactcacctcaatctagtccaaatctagcctgcgatgcctttgcctctggaatcggccttcactcgcatcaaatatatccaaaattagaatcacgatgtcaaaatctgttaagggaacgaagcctatgcgaaaataatcaatatacaacacaaattccgaaattaccaaaacccgacccccaggcccatgtctcgaaattcgaggaaattcacatcggtaggttccttatcttcccacgagttcatacatatcaaaagtaccaaaatccaaccacaagtggtccatcaaaacctcaagtctaggtttccaataccaagccctagtttccccaattttaacccttaaattccattaattacagccctaatccgtaaaataataccttaggaacgagtttaggtccaaactccttacctcaatgaagttcccttgaaatccttcttcaaaatcgtccaaaaagctccaaagccgacttagaaatggtggaatagctcaaaaaacgcgaaggaaacaatttatatgttctagcccagggatttcgcatcttcggtcaaattctcgcttttgtggtatcgcttctgtggtcaagaccatcgcatctgtggtcctcacttaagtcctcattttcgcatctgcgattcactatccgcacctgcgccatcgcaggtgcggttctccaaccgcttctgcagtttctgcctccctagatcctttgcgcttctgcagcccccttttattgcatctgcggcatcgcacctacggttcccaatccgcaggtgcggaaacaatagaagcagaaaatctgcagcttcaccaaaaattccaaagtctccgtcaaccatccgtaatcaccccgaggcccccaggacctcaaccaaaagcaaaaacatatcccataaccttattcaaacttatatcaatcttcaaaacaccataaacaacatcgaatcaaccaaaacacgtcagattcaagcctaagcctccaaaaatcttccgaattacgtttttgatcgaaaacccaaccaaaccacgtccaaatgacctgaaattttgcacatacatcccaaaggacacaaaggaactaatgagactctcagaattctattttgacccatatatcaaaatctcacgtatcaatcgaaaaacgccaaaaatctaattttgctaattcaagcctaaatatactccggacctccaaaacacatttttatcacgcttctaagtcccaaatcacctctcgaagcgatccaaaccatcggaactcacatccgagccctctaacacataagaaaacattcggttgacttttccaacttaagcttcctcaaaagagactaagtgtctcaaaccttaccaaatcctttctaagcccgagccaaccaacacgatcacatatagaactaatagacaaagcaataagaagcataaaagggagaaaacagagtggtaactcatgagacgactggccgagtcatcacagaaccagttctaactcaaaaatttggttagaaaattatgaactttgtacataattaaattagattttgctcattctcatacattcataagtatactcttgtgccatgtgctaatatgacttatctctaatgatattatcgctattttcttgggaaattcaggtttacacaagagatttttcaatgaagaacccagttcatcaagattatttggtacgtattctctactctgcatagtttgaaataattatatttatatcatgtttaagaaaagattcccattcaatatcaaaccccactgtacttatacattacaaaaatggactagtttgttcaaaagaggagtccaaactgcattaaatgcctagattgtagggaacctttccaatgtcttgtcaaacaggaattcagtttgattagacttctgagagactgtcgctacccaattaaacactcctctttaaattgattaggcttagtgtattcttcacttaaactttttaattcattaatctactcttcatcttttctcatcttcgaaacacacttaaactttcttttcttacttccaagcacagaaatggataacatctctgataatccctcttcaccacccaaggaaaacttacccacaccatatgatacaccttcaactactcccatctctaataaaggaagggtaaaaatgatggctcgcaaggttgttgttggtggagagcaaattaataaaatcaatgaaaatttgaaagcaaatagggaagaagaaccccaaaaacctgatgagtcattcaaatctacaactaagggggaagaaacagttccttctgagtgtgaacaggtaacgtctagccccaaagttaatcttgaaactttttttgtggttgctatgaatttgaagaatacgtttgttcttgtaggatataggccaggtgttgaaagtactaagtctggaaaggtgggtggtaaaaataaaaagagaaaagataaagagagagagggttatcgaagtactgtaaggggaatgggaaaaggagtgactgaatctttacgcactcatgttggtctaactaaagagtcaggtgctatggtagtttagggtgaggaatttgttgaaatagaggagagtctgagaaaaatagagggaagtgggtctggagaagttgctgaggggctggttcaactagggaaaatgtagatgaacctgttccatctgaacaggagtccctcacagacctactgaaaagagtgattgaaagctacaatccaaagaagaaacgaagtctaggagttaaaacccctggcaccactagagccaacaagaaaaggaaggttgtttattccatccctgtagaaattcctcccacaaaaggaagatctgctaggagttagaagaagcagagtgaggctgaactggacaaagccttagaagaaagtaaaagaaaagttgctactaagggcaagaaggagatggttgagcctgttgaggttgtttaaatttatgagatagacctggtccttcaagatgaagatgagatagaacaagtggagactgtgactccaaaagctaagataggcaagacttctacaaagaagtctacttcaaatacaaagtctattgttccatccactttgtctaaaagaaccaggttttctatgaaatcaagaaaggtaaaaatggtggaggaagacgaacagagtggagaagaagaagaagaagatgatgaagaagaagaataagaatccgatgttgagaaggacaagatggttaagcttgggaagagaaccatcttgaaaggtaggctgcttatcttcccacgagttcatacatatcaaaagtaccaaaatccaaccacaaatggtccatcaaaacctcaagtctaggtctccaataacaagccctagtttccccaattttaacccttaaattccattaattacagctctaatccgtaaaataataccttaggaacgcgtttaggtccaaattccgtaccttaatgaagttcccttgaaatccttcttcaaaatcgttcaaaaagctccaaagccgacttagaaatggtggaatagctcaaaaaacgcgaaggaaacaatttatatgttctagcccagggatttcgcatcttcggtcaaattctcgcttttgtggtatcgcttctgtggtcaagaccatcgcatctgtggtcctcacttaagacctcattttcgcatctgcgattcactatccgcacctgcgccatcgcaggtgcggttctccaaccgcttctgcggtttctgcctccctagctcctttgcgcttctgcggcccccttttttcgcatctgcggcatcgcacctgcggttcccaatccgcaggtgcggaaacaatagaagcagaaaatctgcagcttcaccacaaattccaaactctccgtcaaccatccgtaatcaccccgaggcccccaggacctcaaccaaaagcaaaaacatatcccataaccttattcaaacttataccaatcttcaaaacaccttaaacaacatcgaatcaaccaaaacacgtcagattcaagcctaagtctccaaaaatcttccgaattacgtttttgatcgaaaacccaaccaaaccacgtccaaatgacctgaaattttgcacatacatcccaaaggacacaacggaactaatgagactctcagaattctattttgaccacaatatcaaaatctcacgtatcaatcgaaaaacgccaaaaatccaattttgctaattcaagcctaaatatactctggacctccaaaacacattcttatcacgctcctaagtcccaaatcacctctcgaagcgatccaaaccatcggaactcacatccgagctctctaacacataagacaacattcggttgacttttccaacttaagcttcctcaaaaaagactaagtgtctcaaaccttaccaaatcctttttaagcccgagccaaccaacacgatcacatatagaactaatagacaaagcaataagaagcataaaagggagaaaacagagtggtaactcatgagacgactggccgagtcatcacagaaccagttctaactcaaatatttggttagaaaattatgaactttgtaactaattagattagattttgctcattctcatactttcataagtatactcttgtgccatgtgctaatatgactcgtttatctctaatgatattatcgctattttcttgggaaattcaggtttacacaagagatttttcaatgaagaacccagttcatcaagattatttggtacgtattctctactctgcatagtttgaaataattatatttagatcatgtttaagaaaagattaccattcaatatcaaaccccactgtacttatacattacaaaaatggaccagtttgttcaaaagaggagtccaaactgtattaaatgcctagattgtagggaacctttccaatgtcttgtcaaacaggaattcagtttgattagacttctgagagactatcgctacccaattaaacactcctatttaaatttattaggcttagtgtattcttcacttaaactttttaagtcgttaatctactcttcatcttttctcatcttcgaaacacacttaaactttcttttcttacttccaagcacagaaatggataacacctctgataattcctcttcaccacccaaggaaaccttacccacaccatatgatacaccttcaactactcccatctctaataaaggaagggtaaaaatgatggctcgcaaggttgttgttggtggagagcaaattaataaaatcaatgaaaatttgaaagcaaatagggaagaagaaccccaaaaatctgatgagtcattcaaatctacaactaagggggaagaaacagttccttctgagtctgaacaggtaacgtctagccccaaaattaatcttgaaactatttttgtggttgctatgaatttgaagaatacgtttgttcttgtaggatatatgccaggtgttgaaagtactaagtctggaaaggtgggtggtaaaaataaaaagagaaaagataaagagagagagggttatcgaagtactataaggggaatgggaaaaggagtgactgaatctttatgcactcctgttggtctaactaaagagtcaggtgctatggtagtttaggttgaggaatttgttgaaatagaggagagtctgagaaaaatagagggaagtgggtctggagaagttgctgaggggctggttcaactagggaaaatgtagatgaacctgttccatctgaacaggagaccctcacagacctactgaaaagagtgattgaaagctacaatccaaagaagaaacgaagtctaggagttaaaacccctggcaccactagagccaacaagaaaaggaaggttgtttcttctatccctgtagaaattcctcccacaaaaggaagatcttctaggagttagaagaagcagagtgaggctgaactggacaaagccttagaagaaagtaaaagaaaagttgctactaagggcaagaagaagatggttgagcctgttgaggctgtttaaattgatgagatagacctggtccttcaagatgaagatgagatagaacaagcggagactgtgactccaaaagctaagataggcaagacttctacaaagaagtctacttcaaatacaaagtctattgttccatccactttgtctaaaagaaccaggttttctatgaaatcaagaaaggtaaaaatggtggaggaagacgaacagagtggagaagaagaagaagatgatgaagaagaagaagaatctgatgttgaaaaggacaagatggttaagtttgggaagagaaccatcttgaaaggtaggctccttatcttcccacgagttcatacatatcaaaagtaccaaaatacaaccacaaatggtccatcaaaacctcaagtctaggtctccaatatcaagccctagtttccccaattttaacccttaaattccattaattacagctctaatccataaaataataccttaggaacgagtttaggtccaaactccttacctcaatgaagttcccttgaaatctttcttcaaaatagtccaaaaagctccaaagccgacttagaaatggtggaatagctcaaaaaacgcgaaggaaacaatttatatgttctagcccagggatttagcatcttcggtcaaattctcgcttttgtggtatcgcttctgtggtcaagaccatcgcatctgtggtcctcacttaagttctcattttcgcatctacgattcactatccgcacctgcgccatcgcaggtgcggttttccaaccgcttctgcggtttctacctccctagctcctttgctcttctgtgaccccctcttatcgcatctgcggcatcgcacctgcggttcccaatccgcaggtgcggaaacaatagaagcagaaaatctgcagcttcaccacaaattccaaactctccgtcaaccatccgtaatcaccccgaggcccccaggacctcaaccaaaagcaaaaacatatcccataaccttattcaaacttataccaatcttcaaaacaccttaaacaacatcgaatcaaccaaaacacgtcagattcaagcctaagtcttcaaaaatcttccgaattacgtttttgatcaaaaacccaaccaaaccacgtccacatgacctgaaattttgcacatacatcccaaaggacacaacggaactaatgagactctcggaattccattttgaccaatatattaaaatctcacgtatcaatcgaaaaacgccaaaaatccaattttgctaattcaagcctaaatatacttcggacctccaaaacacattcttatcactctcctaagtcccaaatcacctctcgaagccatccaaaccatcggaactcacatccgagccctctaacacataagacaacattcagttgacttttccaacttaagcttcctcaaaaaagactaagtgtctcaaaccttaccaaatcctttctaagcccgagccaaccaacacgatcacatatagaactaatagacaaagcaataagaagcataaaagggagaaaacagagtggtaactcatgagacgactgaccgagtcatcacagaaccagttctaactcaaaaatttggttagaaaattatgaacttggtacataattagattagattttgctcattctcatactttcataagtatactcttgtgccatgtgttaatatgactcgtttatctctaatgatattatcgctattttcttgggaaattcaggtttacacaagagatttttcaatgaagaacccagttcatcaagattatttggtacgtattctctactctgcatagtttgaaataattatatttagatcatgtttaagaaaagattaccattcaatatcaaaccccactatacttatacattacaaaaatggaccagtttgttcaaaagaggagtccaaactgcattaaatgcctagattgtagggaacctttccaatatcttgtcaaacaggaattcagtttgattagacttctgagagactgtcgctacccaattaaacactcctctttaaattgattaggcttagtgtattcttcacttaaactttttaagtcgttaatctactcttcatcttttctcaacttcgaaacacacttaaactttcttttcttacttccaagcacagaaatggataacacctctgataatccctcttcaccacccaaggaaaccttacccacaccatatgatacaccttcaactactcccatctctaataaaggaagggtaaaaatgatggctcgcaaggttgttgttggtggagagcaaattaataaaatcaatgaaaatttgaaagcaaatagggaagaagaaccccaaaaatctgatgagtcattcaaatctacaactaagggggaagaaacagttccttctgagtgtgaacaggtaacgtctagccccaaagttaatcttgaaactatttttgtggtttctatgaatttgaagaatacgtttgttcttgtaggatatatgtcaggtgttgaaagtactaagtctggaaaggtgggaggtaaaaataaaagagaaaagataaagagagagagggttatcgaagtactgtaaggggaatgggaaaaggagtgactgaatctttacgcactcctgttggtctaactaaagagtcaggtgatatggtagtttagggtgaggaatttgttgaaatagaggagagtctgagaaaaatagagggaagtgggtctggagaagttgctgaggggctggttcaactagggaaaatgtagatgaacctgttccatctgaacaggagaccctcacagacctactgaaaagagtgattgaaagctacaattcaaagaagaaacgaagtctaggagttaaaacccctggcaccactagagccaacaagaaaaggaaggttgtttcttctatccctgtagaaattcctcccacaaaaggaagatctactaggagttagaagaagcagagtgaggatgaactggacaaagccttagaagaaagtaaaagaaaagttgctactaaggacaagaagaagatggttgagactgttgaggctgtttaaattgatgagatagacctggtccttcaagatgaagatgagatagaacaagtggagactgtgactccaaaagctaagataggcaagacttctacaaagaagtctacttcaaatacaaagtctattgttccatccactttgtctaaaagaaccaggttttctatgaaatcaagaaaggtaaaaatggtggaggaagacgaacagagtggagaagaagaagaagaagatgaagaagaagaagaagaagaatccgatgttgagaaggacaagatggttaagtttgggaagagaaccatcttgaaaggtaggctcctcaggaacttagaggaggaaggaatggtaatgcttctggagaagttacaggtgcaaggatggaaggacatggtctttcagatgatggaaggttggccataactgatattgtgcagtttatggcaaattgtgagatcaagatggtagggtcaccagtgtggtaaagggtgatggtgacttttgatgagaaagagctgagagagatcttggggtgcattctaaaggatacaatgactataagaagctcaaatggacaagcctagagaatctccctactgcccttgccagtactagaaaattttgtgacaatgaggaggaaattgagcccaaggctatttacaaaaatgagatgaagccacccaacaaagtgttgctccaatttgtaaacaaatgtgtgctgccaaggtaggaaaggaggcacatttccacattcatggacctggtccttatggaatgtttggacaataggcggcaaataaattggcctgggtctaaaattcagcttcttgacagggttctaaatggaactaagacttatgtcataccctatggttttattctcacgattgttcttgcacatttaaaggtacccatcaagaaatgggaagttggtacaaacaaggatcattttggggctaacactttgactgcttgtaactatgaggctcaaatcactcccaaaaaacctggttcatccaaaaaggtaccagtgaatagcaaagtgcgagttttggtgcaagaaagtagggcaaaggatgctgagcctgataggctaaagaagaggttggctgaaatggagaccgagagagatgctctcagagctgagcttgcaaaagagaatgagaagaattagggcattcttcaggatatgctgaaactgctccaagccaaaaaccaagaacctggtccttcccagccttaatcctcctaacctactgtagatcaaccagtgacccagcttaggatttttttgtttcttttgctcatgatccaatgttcttattctttttatgctttgtagtaggatcttatcaatcaatgaaatttactgccttttgctctagctgtttgttgatatttcttagatgactaatatccttagatttatagatgatgcttaaatctatgattgcatttgaagtagcctagtggccatgattaatttctatttaaatttggttatctcacataattatgcaacttttcgatgatgccaaaggaggaattaggttgtgctttttctttggactgtgatgtttataacctaatgaacctggtccttgataataagtgataaaatgttctaacattgtgttgatgttgagctgagttgaaacagggcttaagcttatgaaaagcacagattttgtcatcatcaaaaagggggaatttgttggcccaaataaaggtttgttttgaagattgacaaaggaagatcaggcatgaaccaggaccccttatgaacatagacacgggcagatttgagtatatgagatgcatgtgaaggagataagtttaacttggtatatttgatatctcctgatcaaaaagattacataattgataaggagaaggactccttactcaaagagaacactatccaacataagaaaggagataggggttgaagttaactagaactcttccaccaaggaagagtagcattagaactctagttattttctactctactaactctataaatcgcatgatgttctcactttacaggtgatgcacacatactgaagttaagaatgaaatgagtgcaaaatagcaaggcattttgtgagcaattcctgtgagttttaagagtgagatcctgaagctacacgaaccagattgaaaaaccagctttataaagagttttatgtgtctttctttatttttagttcaaagtgtagtatgcattttgagctgtaccttttagctttcttagaagcaaattgtactaggtacttgagttgtatcattcaagttagagttaacttgaagtagtcacaacagcttgtagcatgttgctataagagttagagttaatccttaggtttgcaaaaggttgtaaactcgagttgtattattcaagttagagttaacctgaatcagtcacaacagcctgtggatggttgctataagggttagaattaatccttaggtttgcaagagtttgtaaacattgttgttggctctgagttgtagtaaagtgtttagagaaaatcctactgggtagtaggtcgtgattttttcaccttttgagacgggtatttttcacataaatatctttgtgttttttactttctgcatttattattctgcaatagtagtataaagaacacatagaagaactaggtccttttataatctggtgcacgcaaaaaattagacaccacataaatcacctccctcttgtgtggtattgaagtataaaacatcaattggtatatgagtgggttatccttgaagaggctaacactaggatttgaacattctgggtgccataaattttgaacgtagacatatcataatttatatgctccaaatagggtaacatttagtcggttttatctatttgtatttctctcacgacctggattttccaccatcgggagttgtaatggcgcctactagtgaaagctaggcaagccaaccattgagcaatttacctttttcccatttttaatactttaataatgataaactaacagtttataaacagcgaaatttaaataagcggaagaaaaacaaataaaatcatttaattatttccaatacaatttcttaaataaggactacccagaactggtgtcacaacttcacagacggtctaggaatacaataatcaaggtctaaaaaataaatacaacattgtttctgaaacacgtaaatgaaacatgacaaaaggatagagggagatgccagggcctgcggacgcctgcaggactatcttggatctctgtatggactgaaggcagcaacccaaaagctaaggtccaaaagttattgcgtcgggatctgcacacagtgcagagtgtagtatcatcacaactgaccctatgtgttggtaagtgcctagcctaacttcggcgaagtagtgacgaggctaggaccagactaccaaataaatctgtgcagttatatcatatatagaggaaaataacagtaggggtgtacagttaagaatgggagggggaacatgttgcgtggaaacatcaaatgataatagaaggacaacaggtaattacaaggaacatcataactcaattatcaacaagaatcagaaatcaaacaagtgcacgatatcacccttcgtgtttttactctcgtcctcaccataagagtcaatataatgtacacgacatcactctacatgcttttactctcatcctcaccataaaattaatataatcggcactgaattgtatatcgtgcggcacggcatcacccttcatgcttttacactcttcctcacaaaaattatacacggcatcacccttcgtgctttaacactctctcaccaaaacaatgtacgacatcacccttcgtgctttactcttcctcacccaatcaacaatcataaaaaataatggaaaggaaataaatgaaatcataataaaatcccagcaaggaaataatagtacacaatcatatcctggcaaggaacaatatcaagaacatcaatatcccggcaagggagatagcactaaaagcaacaacatctcgacaagggagacaatataataatcctcttctctttttcacgtttacttcacaactcactacacaacttgagccaatgctctattaggttcaattactaattttacttccacaattcttttacaacttgagccaacactcctcaatattcaattaccaacactacttccacaagctttgctcaacaatgaaatcatcattaaaggcatgaacaatacaaacaaagtcataataatcataatataagactcacgggcaagcttgacaccaaggtgtagatactctgtacgcggcaaaatcagaagacttgatttctggctgtcgagtcatttcggaagcatgccttgggaccccgaggatgggaggccacaatcgagttcccaacctcggggctcattgaagcctgactcataagaaatggagatcgaagccaggacagatggggaagctcccaaggcacacgactaattctgacagggccggcctatccagagcctatgttgaggcatcacgtcaagccatcatatccccatactttgtaattaatctctacatacttgtagtcgagtcccccctcttatataaaggggactcatcctaccttgtaagggcctgatgttgctccatttctccacaagtgcaataatatatctctctcttttctttctagcttgttcatcctcactggcccgaggccgctttaatatatatcgtccttttacttgttcttcaatatatagctcattattggctgaaaagagccttgcttcatcgtatccttaattgttatcccattcctggctgcccccgatagctcgagcccgactcaaacctcgaccccgaggtcctctctgaccggtcctgcatccgggcaacaggccccttcggtttctttactgcctcattttagctcacacttcatcgttaaacctcacaatcttagcatcatctgctctaacaactagctcgagatcatgtatttttagaatctcatttacaaatttaattgttgttaccattttcacggtaaacagtttggcgcccaccgtagggctaaaaataatagtgattattttattgctggttttattgcacaaatacacactatctttcacactttttcttgtccaagatcctttgatttcaggttaaaatgtccggctcggtaagcaaagtcgagaatgactaccccaaaaatcacgacgaaaatggtatggctgttccagtggctggcgtgacaccgcagtaccccgataacacatctggatcaattcaagcggacgcgggcttgcaaggcgcacaataggtcgatgaagcctcgcgcaccgatggtagcatacaacatatcgaccaacaggaagctcaaaaacccccggcctgggaagaataggaagttagtattcatgttatttttggaatgttgcaggcatagtagtttgctatcgctcagctgcaaagccacccagagactcccagcgtagtagccccgaaaacatctccctacgccgagcgagtacccgggagatcaagcaacaacggatcggtaaccgaccccaggatgcttgggaatctcttcgaaaggatcgagtcaggttcgtggaagttcttacagcaaccgtctcctaaggaagcggtcccggaactctcttcacggaaatctggaacgccaaaactccctaggtgcgataggaccttgggtccctacgagcgcaccaccgcttacacgtgcttattcaaaggcagagacctccataatgatgagtgtgagtctgactcattgaggaagttcgaggaaacactctcgaaaaaaaccttgatgcagcaccgcagcctggcacctggcctcgcaaactcgcttaccatatcagcagaccactccacgggagcacacaccgatgttatcgaagcagtaacaaaagggctcgacacacctggggctagacaaagagagagtgaagcactacaagaagtcgcgtctcgttccctgttaggatgaatgagatcgctcccggtttcggatgactggacaacccgggcctccgcccgaaggttaaacgaaatatgcccgacgactccaggacatttcaaacaaatcctgaccagatacccagtcgagatatggtcggatacacgcacctgacactatccacggagcagggccgtggacttccgtccaggaacctcctcaggtttggtatgccgacaaagaagatgatgccaaacaaatggaggtaccctccatgcaccgcgaatggaaggaacgacatgagttgttacttacctcccaatgatagagaaatagctcgagggaaacatccccgagaaatctccaatggaaccagatttgacaaggcacagctagcaggggaaccccgctcagctaagtacaatttcaacattgctttaccgaacatcatgatcaccttaagctaaaacaagaacgataggcgactcaaacctattctaccaagaccccttcaaaagaaccatagcccgacgcagaaaccgtagggcgcgcacagctacggagtaaaaaatggccacccgctcaaaagaacgacaaccgtgctattcaataaaaatcaccaccgagtatcgtcgagcggtcaggctcgaatccaactccaagggaggaaggagaccgggaagaatgaagatgacaagccacgatgtattaccacgacagtgaaggggcggcgacacccttcaaaggccataaaatgtaaagtgaaaatgctcatcaccggggaaacactggtctggggaatattccaaaggacacccttgcttccaaggaaagggacgccgagacttcgcctcggcctcgtattgatgtgttggtaaccctctcactcatttgacctattccaaataaaacatgtgttcatgaatacaggttgttcaattaattataccaacgatgtcaaaccaaagccaatggggcgattcggactaacgaaccaagtcactcccacatctcgaatctttgacagattctaggcaccgatcgccacatcaggaagaccactcccttaatacaacccgtatcagctcggactggaatgccgaacacgcaaggcacgtacgtcttattcagatgacaacgggcacgcctccccggaggcaacttcgaccctactccaccaaatggatgaaaccccaggacaagggtgggactaaagtattcgacaaggagctgcacacgacgagaggaaaaccctcaccatgtaacgcatcgccggcatcaatacgtccgccctcaaaaggatcaaagggtaagcagaatcgcatcttctgctaagcttggttgaacacagcagaaggctgtattagggctcgtgcctcggaacagcagaaacatcccgaacctcgaaaggttacctacgcaccccgcggtgaggaggaactacttcactccttcattattttttcactaacttatatgcaggcaatcagccggggcattcgaaagttctaactccacacggagatccaaggccttagcagggcccgttgtgctctattccctcgatcagactttagacccaaagagggtcccgccaaaaagattattagcagagcagtgtacccccaaagagggtcctgccagcaggatacgacaaaatcacatgccttcttctacaatcgaacgacgggcgatgatcttctttcaagggcaccattccctcagaaggaccgaaaatatcagactgagtgtcaagagggaaccttgtaacgaatcagatggtccgaagagtcgtacctacgtgggccgagctcacaacgacgagagaacatgtatttacaacatatatttatgacaagtaataaagaatatcttttcggcatttcgtacttcggaaaaggggatttcaacatactcatggcaagggcctctctaccgaatgcatcccgagatactcggagacttagcatcagcaattcaatacccgcacgaccccagggttagaactccgggctcaacaagcccctacaaggcaactccgagctcatgaggagcggtcttcaagcttaaacaaattatatgactcagagactgccattgatcgtcatatgctggaaaaatcgaaactgtgagacccctagcaggcagcctcaacgtaaccagatctattatatattacacaaactataagaccttaacaggcatgataaactgtaagacctcaacaggcatgacaaactataagacctcaagaggaatgattaactgtaagacctcaacaaacatgaaaatcctgaagtttaggttatacgtcgcatgtgtaaaaatccctaaagggcataccctcggtgtagacacctaaactatcaatcgggattaaaaatggctacggccaaacgcacatgactatgatcaaaacggttaatacagccaaaataacatgactcggggacacccgactgttactaaaatctcaggacactactccaaatatacttcgaaaagaaccggttaaaatagggttcccttaacaggcaaaaacgaaccccgaccatgtcgactccaaaccgccaaagtgttgatctactcaacctacgagctatgaaccttttgaggtgctcaaaacatcgccgacaacgacttgaaatcgaagttcctctagaaccgaagacgggtcaagcaaaaatattccaaaagaccttaacgagcagaaaacaaagcctacaaaaaagcccacaggcaaaaacagcgtaagagccattgtcgccatctaagcaagcctccgggccatatattaaaaggtctctacgaccaaacagcgtaagagccattgtcactagctaaaatttgacaacttgaggattaaaatgagctcaaatcgtaacccggttcagagatcggatccaaaatagttaactatgcaaacctccgagccacatattgaaaggtctcaacgaccgaaatagcgtaagaggcactatcgtcagtctgaaaaccagaggtacttaagggtcaataaaagatcaagtcacaacgcgactcggaggcttgacccggaataattaaactacaatatgcctaagggcacgacataaatgccactatcgccagccgagcaaatctccgggccatgtgccagtaaggtcatttcgacccggagcacaaaaggccatcatcatccgcctatgcaggcaggaaagagcttgagggtcaattgaagctcgagtcacagtacgactcggagactgaatccaaaatagtcgaaacggcaaatgcccaagagcaagaaataaaaataattaatgcctgcccgagcgggcataaaagattcaagggcaaaaggcttgagacgaagcccgactcagagactaagcctaaaacagtcgggccaagcatggaggccccagcaccagctcacgtaagggattacacttaagagcccctaggtctatccgaccagttccggacctacgaggatcccgccaaacaccaaaaccggcctgcccagtcgaaaagcaataacaaaaaagaggtacagaaaaaataaagcttcaagtttcttcctacatattatatgcgcgaaaagggcgcattctccatctacaagcatgctctacatatatcagaaacaaagcgacaaaatggcgaaatctacactccgcactaaagggctacaacttgtcaaattctccctccgcgacgtcagcaagaagttacagagcgtcgcgctcatccacccttgctcgagccaattctttcgagagaacgaagccccgtacactggcctcctcgagtacctctctccgagatctgcaacgaacatactcctcgatcctcttctcccggtcgagggctcgctttagctcagcttgggcatcagcaacatccttcatatgaatcgccatctcctgatcagccttggtccggcttagcgccactttagcctgggcattaattatctcagctctgaccttcaagagatcagattcgagtttcccaatcatgtccgcttgaactttggcgttatcacgagtcaagcagagttgggcctcgatggcagggaccctggctgaggcacatatctcctctaaagctcaagcttgctcttgagcccttagctccccacaaacaactctgacgcggttgacgtcgcctttgaggtactccaaggcctctgcctttttttgcagctgatataacaaaaggggtgagccttaaggttagagaggagcaaagcgcatactatataaagttacctgctctatcaaacaactctcatagtttgagctctgatacgcctcatatcgccaacgtgccaacttagccccattctcttggctaaggagcctaaaggactcgccatcgttcaagaatttctggagcctggccccttgacagagcagcttagacataagcccatcacaggcctatgcaaggaaaactcaataaagggaggagggcgtgacatacaggaaaaaacgcgcctaaactcacctcgaagagaagccgatggacttcctctaagccagaacacattcctgttgatcctgcctctccggccccaggagaaccaacctcgggcagagcatattcactcggaggaatcgccgcccgggaatctgatactccgggaacatcaggctcagacgatgccctctactcaaagatctgagcccgcccaatgccactaaaagctccatcacaccgcgggtgccgatcccccttatcaccatcctccctcggcttggaggctgacgactctttctcctcttcggaagaacactgtctcatcccaaacaaccgccctgtatctacaaacggtgaatccagtacaaatgaaaggggaaaatattacctcgaatatacgaaggccaagtcaaaggcaacatacgcacataccttggtatttcactccccatttggtacgaaatacagctcgccacctgcgctcgtcgcaagtcgaatgggtcgccaacttatggacccagacgggaaggtcaaggactttgcccggcatccacgaagttgctgcaacaaggtagacaacattattactcaactgattttcgctataggcaaaatttaaaaaagcgccagacactccactcacgtgcatgattccacccttcaggaaatggcaaaagccctgttgggataatgtcagcagtttgagcctgaataaaccaactggcccactctcggtccttgtcttcttcatcatcgacaacaaagggcgtggacaaacggcacctcagagttagcaggcctcgataatgaaatggccggtatagtctaacgaggtgattaaacgtgaattcgagcccaaccttctccacgaagaacctcattatcattaccattcgccgaaacgatggataaatctgcgccagagtaactcgatacttcaagcaaaaatcaagcacaaccctagcaggggggccaaatgcgaaagggtataggtatacgctcaaaactccatcagtggagtctgtaatacccttatttggagaaagcacctgcagtgttaccccctcgctccacccgcagtaattcctcaccatctccaggtgttcccctcttatcaaggatgccgtcttcaaagcaaactccttcggttcttgagcgctgggagcaacacccccccccctgttccctgccgaatcggccctgaagtggtttccatgactatggtaaaactaatagttcaaagcaagggcgtgcaccagcactttttatgcctggagagatgaagtaccctgtgccaaagcaggaaatcgtctatctaaaaatagtgaggtcttgcgaagaagccgaagccgccccacatatatgcgagaagcagcgacgactcgcctacccgatgcgagacccggggagccgacagcctcgatacagatcgacaaatcgatacccaatctagatagaatccttcaatgagaagtcaagacccgaggggccatccatattatctccaagctcgagacaacatcctacctcgaggatccctgacccaaagaagtcggacttcgggaagttttgtaacaccagcactcgatgcagggcaagtacctggtctcgtgattccctctttctaaaaagaggaataaatgtaggaagctccaatctcgaaagctccacaaaggtctgaggcagcaggaaactcctcagcataagtctatcctatacgctttaaaaaagggagggctatctacatcaagattaaaagggaccctcgggtacctgaagctgaccttcatttaggataacattcccgaaggctccaaaattcgacgcattatctccatacagctcgaagggcctcggtagcccgggcctatcaaatcaatctgggattggtctgaagtacgacgatgagttcgaaagagagccatgtcgatcagtagaggatcggaaggaatgtccgcgcccaagtcacatatcagtagtcaacgaataaaagaaggcattcaaagggcctcaaagggcatgagatgatacagaaacaaagtaaagatctaaagcaaacgtcactggagtatattccatttcataaaagatccatttacaacaaccctcaaggggacattacatacaattacaaaatcctacggaggatctctgcgcctaaaagaagagacaaagggatgcacacgccaagtgaaagcccgaaagactggtccacctttgaactccgcaacaggtgcctccggacgtgcatcctcgaaagtttcatcccaaccttccacactgatatccccaagggacaaggtgagtggcggggagggatgaaaaaatggcatagctctccgaaactcgaggaccctctttggccaagggaactctggagtgacatcggaccaaacaaaccttgatcccgcttgcacgactacttagaatccacttcttggaacgtctagccatgcaagcccccaactcggagcggagcaccacatcgagctagggtatgaaggtgagaaacggtgtttaatccgagcccccttttgagcagcggtgcataatccgaatgactgtctacacgaggggaaaattgaccccccttccatcatcatctcgggccaacaacaatagccacagtgaatatgttaacggccacagtagtagcgggacaacatggttatgctcaacgaagggaagcccctgcaaaaggccacgacacagtctaaggaaactcctccaaaaggacttaaggtcatgagcccctagcatgatgttcaagggtgaaagaagatgataagaagaaataggcaagcaagccaacggaggcactgtgataggaaaagcaaagccaaggcacccccatttatagggggttacaacacgctcatctaggctttggaagattgactgacgggcgcagtcaatgcatccatggaaaaccaaaccaacagtggtaccttcaccttgggaagtgagaattaggagtacaatgaatgaggtcagaaatcacgagctcgtggatgtccggttaccacaaagctcacgaccagagtcgcatcatcgatatggcatcgccgaaagaagctcgaggagtcgagtgtcaaaatcatttcccatcacttcataataggaaatgcggagacaatctatacacagcaaaattagaagactttatttctcactgttgagtcatttcggaagcatgcctcgggaccccgaggacgagaggccacaaccgagttcccaatatcagggctcgttgaagcctgacttagaggaaaaggagaccgaagtcagtacagagagggaagctcccaaggcacatagctaaatctgacagggccggcctatccagagcctatgttgaggcatcacgtcaagccatcccatttacatactttgtaattaatctccacatacttgtagctaagtcccccctcctatataaaggggactcaccctaccttgtaagggactgatgttgctctatttctccataagtgcgataatatctctctctctcttttctttctagcttgttcgtcctcactggcccgaggccactttaatatatatcgtcctcttacttattcttcagtatatagctcagtattggctgaaaagagccttgcttaatcgtatccttaattgttatcccattcccggctatccccgatagctcgagcccgactcaaacctcgaccccgaggtcctctccggccggtcctgcatccgggcaacagaccccttcggtttgattactgcctcattttagctcgcactttatcattaaacttcatgatattagcattgtttgctctaacaactagctcgagaatagatcacgtatttttagaatcccatttacaaatttaattggtattaccattttcacggtaaacatactcgtcactatgtctatacgtcgtactcaacaaatagaacatagcaaataggacacaactcctaatccctcaagctaaggttagaccaaacacttacctcgatgtcaattcgctcgtatctagccacaagttacttaactatatccataaatgctaaatgaatcaattccaatacatgaaaataggttttctaaagtttttcccaaaaagtcaaaaatcgcctccgagaccacatggtcaaaatacgaggttcgaaccaaaactcgattaaccaatcccccacgaacccaaatatacaatttgttttgaaatcggacctcaaatcgaggtccaaatccccaaaatttgaaaaacctaggttttaccaaaaatatccaatttcccccatgaaaacccttgattttgagttgaaatcatgagaaaagatgttaaagaataataaaacaagttataaatgacttacaatcgatttgcaagagtatttgtctttgaaaaatcgcccaagagagtttatgttttgaaagggtttgaaaaatggttgaaatgcgtctaagtaatgaatttgcaggtcgcagatgtcgcaattgcgacaagggttcgcaattgagaacccttaaggacttgctacactcgcatttgcgaccattgttcgcaattgcgaaatcgcatttgcgatggggaagtcgcatttgcgaccatcgggatttctaggcctcttcgcatttgcgaagaaatgatcgcatttgcgatcagccctgcccaggccttctctcgcatttgcgatgggttattcgcatttgcgatctcgcatttgcaagccaggcttcacaaatgcggagcctgcagacctgcaacatgctagctaaaaacctgcaacttctcaaatccaaatttcactatgtggcatatccgaaactcacccaagccctcgagactccaaaccaaacatgcacaccaacataaaaacattatacggacttgctcgtgcaatcaaatcatgaaaataacatgtaaaactatgaattaaacctcaaaactcatcattttcatcaagaacacttaaagttcatagctcttcaaccggaggtccaaatcacgtcaaataaactctattttttaccaaattttatagttaccatttaaatattttaacaagtttgtaccgggatctggaaccaaaatacgggcccaatgccaatgattttaaacattaattcttttctttatttcataaataattcagcaaaacaatttctttcaaaaattgatttctaaggcttgggaccccggaattcatttctagcatacgcccaagtctcatattttattgcggacctcctaggattgtcggcatatagatccgagtctgtttgctcaaaatgttgaccaaagtcaaccaaaatcaaattttaactctagaaatttttatttctcatattttcacataaaagctttccagatatacgtccggaccacgcacgcaaattgaggtaaggtaaaaaggaggttttaaggcctcagaatataggatttgtttctaaaataagtgatgaccttttgggtcatcacatcctccacctctaaaacaaacattcgtcctcgaacggacataagaaggaagtacctaagtcggggaaaagatggggataacagctccgcatattggactcggactcccaggtcgatgcctcagcaagctgacctctccactgaacacgaacaaaagggaaactcttcgatctcaactaacaaacctgccagtctagaatagctactagctccttctcataggagaagtctttgtccaactggacagtgctgaaatctaacacgtgtgatggatcaccgtgatactttcaaagcatggacacatgaaatactagattcacgattgataagctcggcagcaacgcaagtctgtaagccacctctcccactcgatcaagaatctcaaacgggctaatgaacctagggctaagcttgtccatctttctaactatcatcacgcccttcataggagacttccgaagcaacacccgctcacccaccatgaacgccaaatcacgaaccttatggtcggcataactctttttcctggactgagtattacgaagcctatactgaatgatcctaaccttgtccaaggcatcctgtaatagatgcgtacccaacaaccgagcctctctcggctcaaaccatccaaccggcgactgacaccacctaccatataaagcctcataaagagccatctagatactcgactggtagttgttgttgtaggcaaactccactagaggcaaaaactgatcgcacgagcctccaaagtcaatgacacaagctcggagcatatcctccaaaatctgaataatgcgctcggactacccgtctatttgaggatgaaatgttgttcttaactcaacccgtgttcccaactcccgctgaactgctctccagaaatgtgatgtaaactatgtacctctatccgaaatgatagacatgggcacaccatgaaaatgaacaatctctcgggtatagatctcagctaacctcttagaagaataggagactgccaccggaatgatatgtgctgacttggtcaacctatcaacaataacccacactacatcgaacatcctctaagtccgtgggagtccaacaacgatgtccatagtgatatgctcccacttccactcaggaatctcaatcttctggaacaaaccaccaggcctctgatgcttgtacttaaactattgacaattcaaacatcgggccatctatgcaacaatgtccttcttcattctcctccaccaataatgctgccgcaaatcctgaaacatcttagcggtacccgggtgaatagagtaccgggaactatgggccttctctaaaatcaactcctgaagcccatccacattaggcacacaaactcgaccctgtagcctcaaaactccataatctcctaatgtactttgcttggcacctccgtattgcaccgtgtctctaaggacacacaaatgaggatcatcatactgccgatctcggatacgcttcaaaaaagaagaatgagcgactgtgcaatctaacacacggtccaacctcatgaactgattggccaaagcctgaacatccaaagaaagtggtcactcaccgacctgaatatacgcaagactgcccatactagctgacttcctactcaaagcatcgggcaccacattggcctttcccagatggtataagatggtgatatcatagtccttcaatagcttaaaccaccttctctgcctcaagtttagctccttatgcttgaacaagtattgcaaactcttgtgattcgtgaacacctcacatgacatgccatatagataatgcctccaaatcttcaacgtgtgaataatggatgctaaatccaaatcatgaaccagatagttcttctcatgaatcttcaactgatgtgaagcatatgcaataaccttgacatcctacatcaacaccgcaccaagtccaatacgagatgcatcacaataaactgtttatgtccctgaacctgtgggcaaaaacaacactagcgtcgtagtcaaagctgtcttgaacttctgaaagctcgcctcacactcggccgaccacctaaattgggcacccttctgggtcaacctggtcatcagggctgcaatagacgaaaacccctccacgaactgatgataatagcctcccaaacccaagaaattctagatctttgtagttgatgctggtctaggccagttcttgactacctctatcttcttaggatctacctgaataccctttgctaatacaacatgacccaagaatgcaactgaacttaactagaactcacactttgaaaacttagcatacaactgactatctctcaaagtctggaggaccactctcagctgctcatgctcctcccgggtgggagaatagatcaaaatatcatcaatgaagactatcacaaatgaatccaactaaggactgaacactcggttcatcaaatccataaaagctgttggggcatttgtcaacccaaatggcatcaccaagaactcataatgcttgtgccaagtgcggaaagctgtattagggacgtcagatgccctaatcctcaactgatggtagccagatctcaagtcaatcttcgaaaataccttggcaccctgaagctgatcaaacaaatcatcaatccttggcaatggatacttattcttgattgtgaccttgttcaactgtcggtaatctatacacatcatcattgatccatccttctttttaacaaataacatcggcgcaccccaaggtgagacactaggtctaatgaagcctttttcgagcaagtcttgcaactgctccttcaactcattcaactcaggcagggccatacgatacggcgggatagaaatgggttgagtgcctagagccaaatcaatacagaagtcaatatccttgtcgggtggcatacccggcaggtctggaggatatacctcaggaaactcacgaacaataggcacaaaatcaatagaaggaacctcggcactagaatcatgaacatatgccaaataagccaaacacaccttctcaaccatacgtcgatccttcatatatgagataacactacgggtagaatgaccaggagtccctcttcactgtaaatgaggcaagcccgtcaaggctaaggttacagtcttggcatgatagcccaagatagcgtggtaaggggataacatgtccatccccaatatgacatcgttcagacgtaacaaatctacatgagtctcaagacccccaatcacaactatacacgaatgatgaacacgatctaccataatataatcacctaccagtgtagacacatatacaggagcacttaaagaatcactaggcatgaccagatatggtgcaaaataagagtacgtagatcttggatcaaatagaactaaagcatctctactacaaaccagaaccgtacctgtgataactgcatcggaagccttagcctcaggcctcactagaagagcataacatcggggctaggccttaccaccttgaactacatatctgggacagcctgctgctagctggcctccacctctagcggcttgacctccacctctaatacctctacatccacctctagcacctctacctccacctctagatggctgagcgagctgtggaacactcaatgcctgaaccatggcacgagaaccctgatgctgagagctactcaatgcttgagggcaaaatatagcaatgtgacccatatgaccataagtataacaagccctcggctgctgagactactgaccctgacgacctgaatgaccacctcgaaactctggagcggcgaggcactgataggagcttgcggtgcactatagtactgttgatccgaatactgcatatgagaatcacggccacctgaaaaactgtgagaaacctgaagtgttgactaaaaaggcctaggatgatggcatctaccgtacaaatccctgcctccagatgaggccccactaaatctgcctaaatgacgaggcctcttgtcagacccctgaccacctccctgtgatagaactatctcaactctcctgtccacattggccgcctcctaaaaagaaatctcactctccgtctccttagacatctaaagtcgaataggttgaatgagtccctcaatgaacctcatcactctctctctcttagtgggaagtataagtaaagcatgatgggccaaatcaataaacctggtctcgtactgagtaacagtcataaaaccctgctagagatgctcaaactgcctctgatggatctctctctgagtgatagggagaaacttctccagaaatagctgagaaaactgctcccaagtcaaagctggtgacccgtctggtctagccaaacaataatctctccaccaagtcttggcggatctagacaagcgaaaagtagcaaagtcgaccccattggtctccactatccccatgttcttgagaacctcatgacagctatctaaataatccaggggatcctcagaagatgcactgctgaaaatggtagtaaagagcttggtgaacctgtccaatttccacaatgcatcggcagacatagctgctccatcaccagtctgagctaccatgcccggctgaacttctccaactggctgagctgttggagtctgaaactagggagccatctactccggagtgcgagtagcaggattctgggctcctcctctagctcgagagatggctggtgctacaggaagcaagcctctccataaggcccaccagacggactagagcatcctagagcactggtgtagtaatgaacccatctgggacctgatctgggcccaccggaactacctaggccggaacctcatcatcaaactcaacctgaggctccgccgctggtgctactactttgggctaagctctgcccctactacggcgtctagcacggcctcggacttgccctacgaacctcgtgggagctgctgctaggggctcggttgctgatcagtggatgaggaagcgcgtgttctcgccatctacaaaagaacagagtagaaattcaattagcattgagaaaccaaagcgtgcaacaggaaattgtgaagtttttcctaactctgtagctgctgggatacatacagacgtctccgtaccgatccctcagactctactaagcttgtccgtgagttgtgagacatatgtaacctagagctctgataccaacttgtcatgacccggatttcccaccctcgggagtcgcgatagagcctactgctgaaagctaggcaagccaaccattgagcaatttacctttttcccatttttaatcctttaataatgatgaaccaacagtttataaacaacggaatttaaacaagcggaagaaaaacaaataaaactatttaaatatttccaatacaatttcttaaacaaggactacccaaaactggtgtcacaacttcacaaacggtctaggaatactacaaacaaggtctgaaaaataaatacaaaattgtttctgaaatacgtaaatgaaacaggacgaaaggatagatggagatgtcagggcctgcggacgcccacaggactaccttggatctccgtatggactgaaggcagcaaccccaaagctaaggtccaaaagctactgcgtcgggatctgcatataatgcagagtgtagtatcagcacaaccgaccccatgtgctggtaagtgcctatcctaacctcggcgaagtagtgatgaggctaggaccagactaccaaataaacctgtgcagttaaatcatatacagtggaaaataacagcaggagtgtacagttaagaatgggaggggggaacatgttgcggggaaatatgaaatgatactagaaggatagcaagtaattacaaggaacaccataactcaattatcaacaagaatcagaaatcaaacaagtgcacggcatcaccctttgtgcttttactctcgtcctaaccataagagtcaatataatctgcacggcatcatccttcatgcttttactctcgtactcaccataaaatcaatataattggcacaaaattgtacatcgtacagcacgacatcacccttcgtgattttacactcttcctcacaataatcaaacacggcatcacccttcgtgctttaacactctctcaccaaaacaatgcacaacatcacccttcgtgttttaacactcttcctcacccaatcaaaaatcacaagaaataaggacaaggaaataaatgaaatcataataaaatcccggcaagggaacaatagtacaacaataatatccaggaagggaacaatatcaagaatatcaacatcacggcaagggagatagaattaaaagcaacaacattccggcaagggagatagcattaaaagcaacaacatcccggcaagggagacaaataataatcctcttctttttttcacgtttacttcacaactcactataaaacttgagccaatgctctataaggttcaatttctaattttacttccacaattcgtttgcgatgggttattcgcatttgcaatctcgcatttgcgagccaagtttcgcgaatgcaaagcctgcagacctgcaacataccagctaaaacctccaacttcccaagtccaaatgtcactctgtggcctatccgaaactcacccgagccctcggggctccaaaccaaacatgcacaccaacctaaaaatatcatacgggcttactcgtgtaatcaaatcatgaaaataacatgtaaaactatgaattaaacctcaaaactcatcattttcatcaaaaacacttaaagttcataactcttcaatcggaggtccaaatcacgtcaaataaactccatttttcatcaaatttcacagttaccatttaaatactttaacgagtttgtaccggactccagaaccaaaaaacaggcccgatactattgattttaaacattaattctttttttatttcataaataactcagcaaaataatttctttcaaaaattaatttctaaggcttgggacctcggggttcatttccgggcatatgcccaagtatcatattttactgcagaccttccgggatcgtcggaacacagatccgggtccgtttgctcaaaatattgaccaaagtcaaccataattaaattttaactctagaaatttctatttctcatattttcccataaaagctttctggatatacgtccagaccacgcacgcaaatttaggtgaagtagaaaagaagattttaaggccttggaatacaggatttatttctaaaataagtgatgacctttcggatcatcacaatttcgatccaaaaagaaattgtgtaattatttatgataacttggtgaaaaacaaaataaactcagtcgaagtatacatgattttaaataaaaagaaaagtgtatgtattttgtacaagaaatagtgactcactaataacaatgcataattaaatactctacggcaaaaatttatactaataagcactttgaactttgaaacagtagcaagtttcgagacgtttttcaactcaccatttttcatgaaaattgattcatttgagattattatgtataattgtccttctacagaataatctgacaaaaaaatataactccaatccttgattaaattagtaacttattcaagtattttattttctaaaaaaaatctgtaaataagttaagtggagttatgctcacaaagaaaaatatttaattttccattatttattgataaataattgaaggagctaggaaagcacaatagtagggatttctttcttacgagaaggggtgatgaagagaagccattttcacagccatcttcacacagaaaagagaaggacgaagaagaaatatttcagacagacacttagcttttcggacttctctatattgtgttgaagtgcccaagtgttttatcaattgtagctcagccttacccgtggaagaattatggagggtcatgatcttttattctcaaccatctgatcaatatttaaatagttgtacttaaggaagcttccaagaagccaaactcatgtgtttctcgcttgagcacatgggaaagaatattttttagttttctgttacatagtagacaaataagagtagtacaagtgtataggaatattctttattttttattttactgtaggataaatctatataattagggatttacattatcaatacaaggcagagaaatttcacaattctttcctattttctttcatggtatcagagcagtagtagatcgatccaaatttccttttttctcagaatatagtattcaactatggcaggagaagaagttcctccgactctttttactcccattatctctggttcaaccattcacaggatgtgaatcatccttatttcctttactcgtctaattctcctggtttgagtcttgttaccacactatttgatgatagaggctttgagggacggaggagattaatttttgtagcactttaatccaaaaacaagataggcttcataaatggtgtgtgggaaaccaaaacctgatgtacgagatcaccttcaatggagcagatgcaacttcatggtgacatcttggcttctgaactctttatccaaagagataggtggcagtatcatctattcataatctacaaaagatttgtggaatatccttgaacacagatttgggcaaactaatagagccaagctgtaccaactgcaaaagaaaatatcagtgttagttcaaggtaacaacagtattattggatactttaccatacttaagaaattatgggatgaacttgactccctcaactctcatctagtctactctagtaactgagtttgtgatggaaaaagaaaagtcacaaagtttttagaagaccaaaggatcattcagtttttaatgggactaaatgatgtctattcccaggcaagaggaaacatccttatgatgaatccattgtctagaatagatttttcttattcacttcttctacaagataaaaatcaaagggagatatatgcaagatcacagttcaatgctgatgcttcctcattcatggtaggagttcaaggtaaggctccacagaaaaacaacaatcagtcacaacaaaagtcatggactaattcacaaaaggttaataacacacagcagaaacctaagggaaggaaagcaaaatttaatcctaatatgaactatacatattgcatgagaattgggcatgtcagggtagattgttataggctaaatgggtttccagatgatttccaattcaccatatcaacacaggtcaaggctaatgctatagttaaaggacaagacaatgacaatggaagcactcaaagcaatgatggaacaccttaaactcagtttttcagtaaggaacatatgtctgagctgatgaacctaatcaagcaggcacaacttggaaatatagcaacattaggaactacaatcaatgcaaatgcagtggctgatacaatacttaaatatactaaaacttggttggcagctattaacacaaaaacctggatcattgatttaggggcttctgaacacatgtgttttgattcaaattgtttcttaactttagatccacttcctattcctgtatatattagcctacctaacttatttcaattatatgtcaaacacataggtagtgttcctattcagtctaatatgattcttgaaagggttctttatgttccttctttcaaatataatttactcccagtccataagttgtgtgtccagttttattgctcactcaatctaatttctagtggatgcatcatgcaggtccctttaatgaagagggacaagtttttgatgaattaagaggagaattgtacctgctggaacctagtacacctaaaatagattctggttttagtttaaataccaatatattttcaattccacaaggaagtgattccattctagttcctagtgaagtttcttgttctgtttctaattccaatatagaggtctccaatgtactccaatggcatttttagattggggcatctgccatttttagtaatgaaaaatcttcaattcatttattttccttccaatttcaattttgtgtgtgatatttgtccaaaagctagacaaactagattaccttttcccttgagtcaaatcagaactcatggaattttttatcttattcgtattgatgtatgaggaccattcaaaagtactacttacaatggatataaatatctcttgaatgtggttgataattttagtaggggaacttggactttccttttaagttccaaaagtaatgatttcactatcttacaatctttcttagttatggtagagagacaatttgcaaggaaagttaaaagaattagatctgataatgcaataaaatggggaagggatcttttcagtctgattttctttagtctcaaggcatcttacatgagacttcatgtgtagcaagtccccagcagaatatggtagttaaaagaaagcataggcaccttttggaagttgcaagaggattttattttcagtcacatgttcctatccaatactagggagagtgtattttgactgttacatatctaatcaataggtttccttctagagttctaaaaggaaaaacaccttttgagattttgtttaaaaggagtccacagaatgaacaactcaagtcctttggatgcttatcttgtgcctctactctaacacaaaacagaagcaaatttgatcccatggcacacgcttttatttttctgggatatgcacaacatcagaaaggatataaattgctagagttacattctaagaaggtctttacctcaagagatgttaagttccatgaagcaatttttcttttgtttctgctgctccaacctcattctctcctttcccccttatcttttcttccctcacccatctaccactactgaaactacttctcaagatttcctatctcccaactcaaccatcaatcattagtcacactcacatgtccctctatatccaaatacttctgagaatagcacccttatttctctcaataatcctggaaatcctgtatctattaccagctccccagattctccttttcataatccatctcatactgattactctatttcacagcctacaatcccaataccaccacctcctcttagaaaatctgagaggatttcccagaaacctacctatctcaataaatatgtctgcaatagcattgttttctctaatcttacctcctcctgtttttatcatatttctcaccctaattgtcacgaccctaaatgctcggtcgtgatggtgcctatcacaatactaggcaatccaacccaaaccatcaaccacaataatttcttttataaaaaccatttcctaacattgatttaaatctcaaattctcataagaaatgtataaaacagctaaaatgtgtggaatttagtaaaacattaaaccaacatagcctaaacatctggagtcacaagtctagagcctctaaatatataaatccgactatctaatacataacaagtctaaaatacagaaaaacaaggataggaaggaagaaagcagggctgcggattccatgcatctaccttgcagtctctggcaaactctgacaatgctgaggaccctcactctgccgctcgggcacctagatctgcacacaaggtgcagggagtaacgtcagtacgccaactcaataagtaactaaagtaaataaggtctgaaagcagtgacgagcagttataaaatcatatagaagagtaaacaacagaataacaaatcaaactcaacggttttagaccagtttcttcataaaacttcagtttcaattgaaatactttgaaatcatttaaaaaatttcagcagggcttattttaaaagaagagtgaaatcagcaaaagtatcataaatgggcccctcgggcaaagtatcactcaaaaatatagcctctcgggcaaacctcttggtcacccatgactcagctctcatcactcagtactcacactcagcactcaggctcaaatacacctcataatagtaataatcataataattgctgcgacgtgcagcccgatccatagtttatagacgactatgcttactgggggtgtacagactctggaggaactcctacagcccaagcgtcatatcgctgcggcgcgcagcccgatccaacatatatatattgttgcagcatgcagcccgatccataatatatacatataatattgttgcggtgtgtagcccgatccgtaatatttataatcctcaccattaggtcctcaacctctgtcagtcattaacctcacaaccactcgggcataacagtagaaatcagggaaactcagttcgaagagttctcacattttaagaagtagaatgataaaaccagttttaaataataaacaggtaaaacatgactgaggatatgctttcaaataaatagagtgaggaaaacagtaaaaatgcccctaagggtttcaacaggtcggcacaaggcccaaacatggcatacaacccataatacaatataaatgtctaaaatatgagattttataagatttcaaatcaagtacgcagcttaatagtcgctacggggcagaccaagtcacaatctctaccagtgcatgcccacacgctcgtcacctagcatgtgtgtcacctcatttatcaaaacatttcgaaataccggggtttgtaccctcagttccagatttacaatggttacttacctctaaccggatgaattactactccacaatgcctttgcctctcgcctcggcctcaactcgcactgaatctacccaaaatcagaatcataacattagaatatgctaagggattgaagcccaagcgagaataatcaaattataccaaaaattctgaaattgaccaaaacccgacccccgggcccacgtctcaaaatatgataaaatttgcatcaacagaatccttatcactccatgagttcatacatatcaaaagtcccaaaatccagtcacaaatgacccctcaaatcctcactcaaaggtcttcaataccaagccctaatacctcaattttcttccttaatttccactaacaccatgattaaacaatggaaaaatgatcataaactcaagtaatgaagcttagggaacttaccaaactgatattcctcaattttcccttgaaatccactgccttagcccatttcccgtcttcaaaaatggagaacttagcaaaacttcacgaaggaaacattatatactttctgacctaggggttctgcacctgcggtccatccaccgcatctgcggtactgcttttgtggtccaagacatcgcacctatagttttccacttaaatgtccaaagtcgcatctgcgatcaaataacaacacatgcgccatcgccggtgcgctcaacataccgcatatgcagctcccacccctcgcatccttgaacgcatctacggcatcgcacctgcggtccccaatccacaggtgcggaaacaacagaagcagaaaaattctgcaacttcaccaaaaaatcaaactcttcgtcaaccctccgaaatcaccctgaggcccccgggacctcaaccaaaagcaccaacaagccatataccaccactcaaacttgtaacaatcttcaaaacacctcaaacaacatcgaatcagccaaatcacattgaaatcaagcctaagattctaaaatatttcgagttttgcttttgatccaaaaatctatcaaaccacgtccgaatgacctaaacttttgcacatacatcccaaatgacacaacggacctactacaactctcagaattccattctgacccctacatcaaaatttcacctatcaaccggaaaacgccaaagtttcaatttcgcaaattcaagcctaaatctattccggacctccaaaacatattccgatcacactcctaagtctcaaatcaccccctcgaagctatccgaactatcagaattcatatacgagccctatttcacatacgtcaacattcagttgacttttccaacttaaactcactcaaaagagactaagtgcctcaaacctcgccaaaatttttttgaacccgagccaaccagcccgataatacatgagacgactagtcgggtcatcacactaatattttttcttttggagacctttctctcaacaatcagactattttcaaatctatctccacagtttttgagcctaccagctatacacaagcttcccaagatcttggatggagaaaaataatggaagctaaaattcaagctcttcaactcaacaacacctggaatgttgtttctttacccccaggcaagaaagaattgccttgtaaatgggtttacaaggttaagcacgaatcagatgggtcaattaaaaggttgaaagccaggttggttgtcggggggacatacaaagggaaggcattgattattctgagacttttagtccagtggtcgagatgaccactatcagatgcttattgactgtagctgtgaataaagggtgggaagactcacaactggatattaacaatgcatttctacatggagatctataggaagaggtgtatatgaaatttccagcttgtctcactccctctcatcctaatcaggtgtgtttattgaagaaatcactctatggactaaaacatgcctcaaggcaatggtatgctcgtttagcaggtccctagcagagtcgctagagctgtcacacctcctttttaccacccccaaaagggatataagggagattttttaaatttaaataacaatcgaaacggtattatttatttaagatcagagtcgccacttgggataattaatggtgtcccaagtcaccggtttagaattctgaatcgaggaaattgactctgttttatagtccgcaaacacaaaaatccgggtatagaattctgttctcctgggagaaggtgttaggcatttcccaattccgtggttctagcacggtcgctcaactattattattggcctatttatctgatcttttacacgttttaaaacctactgtgcatttttaactttttagcccttttaatattttaggaaatttcaaggttatttaaaacgcatcgtaatccctgctatatgaaatgcaattgtggttcacgacacgttctatttaaccttattggaaaggagaatcaggtcacatgaaatgtacacccggatttataacatatttattccattattattatcaaaattatggcagggtcacatgaaatgcacactcgagcccttttaatctagttggcgtagttcagttgatggatagcgactcaattctatactatgacaaaatcatgtttagatataaccaattcgagtaaacacgagcagataaccgagcaagaaaattcagaaccacaaaaaataattacggaaacaacggaatcgcatcaccaaccaaattattaacattaagcttgattaaaacgaatagagtataaaagaattggacctcaatatagccggggaattgtttgtttcaatgtttaacgctcaaaaatgtgacgaaccatggacaaaacccgaattagcaacaaaaactcaactaaacacggattcaaacccatgctttaatcattgttcacgccagaatcaagcaaccaaaataatagtctttcagccttttcagttctcacgttttgaaattagagttcatttcaatctcaaataccccataacacttacgaaatcttctgaaaaaacataaatggatagtgtttcgtttgttgataaataacagtaactatacgaccaaagttttaaaaaaacaaaacgggtggagctgttttggtacttgaagatgactggtttgagctactattttcgtatatttggagctggttctatggctagttgcaacgggggttggaggagaatctaaatctattttggtggctgaaaatgccactacctctgtcgaacaccgaaattctgcgactgtaacaatgctttttaagaagaggaagatgaggcgctgtagctttttttgtatgaagaagcctggccgctgctagctattagggatccaccatttttgggttcaagatggaggggtgtgggctattcatgctttagcacttaagaagatgaaaggcaaagtcgtttggggttgaacggtgctggtctttggcttggtgttgctgatggtgtatgttgatggatctagcggctggggtggaagggtttgaagaagaaacgtgggggggctcgtgggtgtcagcggcggatctgatgtgatttttgggatctaggtttttgttcctcatttcagattttccttaggtccttttttcatttttctgttgtcttttttggctcttagggtcctaggctctatatataaaatctcatcactttaggtcttttagggttatattaggttagggggtatgggcttgaaaattatgggctaggtccgaaaattaggcctaaaatgggtcgttatcccaaattttattctttccgcaaacgagactaaaaacacgatctcatttactaattgatcctacttaagtaaaaataactattaaaataagactaacaattaaaacaaacttattttttggtgttttcaaatatcatattaaaataataataaggtactatttttgtatttttcttaatttttacgaaaggtatataaactaaaagcaactaaaaacaagaaatattttttgtaatttttattttgtgataaaaataaagtaaaagggtcaaaactagttaaaataactatattagacctaaactaaatatttaaatacaaaaatgtgtaaaatcttggggagggtcaaaaatcacatgtctacagctattctatttccctgaatgactattccttattctacaaacacacaaataagaggatatccatcatagtagtatatgttgacaatattctcatcacaggaaatgatgccacataaatacaacttatgactcaatttttgaattctgaattcaaagtcaagaacttgggacatacatactatttcttaggcatggaaatactcagagaacaacaagggtacatagtcagtcaacaaaaatttaccttggaactattggttgagtttgattgtaaagggcctaccgtctcatctcttcttgatccatactccaaattgcacgctgaattagaaccaccaatggaggatcccactctttatcgatgatcggtaggtgaacttaactatctcaccaatactcggccagatatttgttttcttttctttgccttagtcaatttatgcaaaggccttctctttcacatttttctactggtctcagagtgttctgatatctttgatcagacccaggccaaggtatccttctctcttctgctccctcttttgatcttgtcgctttttgtgatgctgactgggctgcttgtaaagattctcgtcactccgtcagtggtttttttattactcttggaggtgcccctatttcttggaaatcgaagaagcaaatctccatctccttgtcatccgctgaatttgagtatcgatccatgagatgggtgactgctaagatcacttggcttgttcgactccttgctgatttatctactcctccaactttgccggttcctttacactctgacagtctggcggcgattcatatcgcccgcaatcccatcttccacgaacgaactaaacatgtagagttggattgccatttcgttcgatagcaatttctcgctggattgatatccctttcattcgttccttaaaaatcccaaattgcagatctctttaccaaacccttatctagggtttctcacaccaacatcatgagcaagctggggtttttgtctctaccctccagcttgaggggggatgatgaagagaagccattttcacaaccatcttcacacagaaaagagaaggaagaagaagaaacatctcagacaaacacttagcttttcagacttctctatattgtgttgaagtgcctaagtcttttatcaattatagctcatccctacacgtggaagaatcatggagcgtactcataatcttttattctcaaccatctgattaatatttaaacagttgtacataagcttccaagaagtcaaactcatgtgcttctcgcatgagcatatgggaaagaatattttttagttttctgttgcacaacagacaaataggagtagtgcaagtgtataggaatattctttatttgttattttacaataggataaatctgtatatatatatgatgactcggccagtcgtctcatgcgttaccgctccatttccaccatttatgcttctttatgctttgtgtatctgtgttatgtggtatcaggttggttgaatcgaatccgaaatgattttggaaaggtttgagacacttagtctcttttgaggaagcttaagttggaaaagttaaccggatgttgacttatatgttagagggcttgtatgtgaatttcgatggtttagatagcttcgggaggtgatttgggacttaggaacgtgatcggaatgcgttttggaggtttggagtagatttaggcttgattggcgaagttgatattttggtgatttccggttagtaggcgagattttgatataggggtcggaatggaattccgagagttgcactatttttgttgtgtcatttgggatgtgtgtgaaaaatttcagttcatttgtacgtgttttggttgggttttttatcaaaagcgaaattcggaagattttagaaacttaggcttgaatccgatgtgtttttgttgatttgatgtgttttgaggtgttttgaagattggtacaattttgaataaggttttgtgatatgtttgtgcctttgattgaggtcccgggggcctcaggtgagtttcggatggtcaatcggaccatttcttgccttggagaggttgcagattttggttaagttgttgtagagcttttactcttcgcgatcgcgtagggagtctcgcgatcgcgtagagctattgtggggacagtacagtttactcagtgccttcgcgaagatggggatgtgatcgcatagggtaaaggcattgttgatcgcgaacgcggggagtgggtcgtgttcgcgtagagttaagtggaccaggggtcttgtcttgaagttgttcattgcgaatacggtagccagtccgcgatcgcatagtgttgggagcttgatcatcgcgttcgcatgggatattacgcattcgcatagggttaaatccgggagctgaggatttgtgcttcgcgatcgcgaaggatgtcctgcgatcgcgatgaaggaaattaggcctgggcagaaggtttaaaaggtcgtcttatccgtgaatgtggggtttatttcttccattgttggtcatttttggagctttttgaaggggattgaagagggattcaaggagaatcacttggaggtaagattcttggacttaaaactcgattctaatgtgaattccacatagtaaatcatggaaattaagccaaaaataaagaactagggcttcactatttagacctttgattgaggatttgaaagaccatttgaggttggatttcagaacttttgatatgtatgaactcgtggggagataagaaatctattgatataaaaattattgaattccaagacgtgggcccgggggttgggttttggtaattacgggatttatgttgtaaattaattatattcgcttgggcttcattcctttagcatattttgacatcctcgttctgattttggagagttccgacgcgattagaggccgattcgaggggaaaaggcatcacgagctagagatttgaccggttcgaggtgagtaatgattgtaaatgatgttctgagggtttgaaaccccggatttgcacatcgtggttctatattgaggtgagacacacgtttgatgatgagcgtgaggtcgagcactaatggggattgtgacttggtccatcccgactgatgattttaccgcgtatttgactgaaatctatttgatatcataattatttgggctgaatgccaactatttgaacccttcagggatttttattgatatttcctcactgttttaactttatacttgaactcaatcatgttattttccattgttttcatactcagccatgttttactcagttttaatacttaaatgatactttaaatgatgtttgggctgagaaacactattttactattgcgcgagtggcttgtcaggatttttgactgagtaaggccgagggcctatgttttgaggaaacatttgatactgattatgaggcctagggcctgaggtatgtacgccgcgaggtggcttgattgatataaggccgaggatgtagtgatgatgccacgaggtggcttgatattgcgcttgggccgtaaggggcccctccaagagtctatacatccccagtgagaacgagtacccattgtgatacgagattgagcctgaggggctggtattgttctaagataatgcccgaggggcaggtactattctgagatgttgcccgaggggcggatttgttgatattgtgcctggggggcaaacctttatgtgtttatttttcataattgactgtcaattacctacttaattgttgaaaaaggcttttaaggaagtaaatttgagttaaaggattttcacctatctttcactggtttactgttttaaaaagtgttttcactgcttcattatagcatgcttttgtgccttgcatgatttcctgctttcagtctttatttatgattattactcactgagttggagtactcactttactccttgcaccctgtgtgcagaaacaagcgtatctggtcctgctccttagtgttgaccgttccggctcaggcggatctaaggagtctctaggtagctattggcgttcgcagcccggagctcttccctattttacttcttcattttcttagtttctatattaaactctgtagtttgatttgtagtattccgaattgtttagatgctcatgactactaacactccggtatcagtatgctattaattgttgtgtttgggctgtattccgcatattattctattaattgcttaaactttggtttatttcttcatgtttagatggtatcttaaatgcttaattattaataatcggataatgggaagtgtcggctggccttgtcttcatgagaggtgccatcacgactgggttcgggtttggagtcgtgacaagttggtatcagagcctaggttatataggtctcacgagttataagcaggtttagtagagtctcgtgtatcggtacggagatgtctgtatttatccttgagaggctgcagaacctttaggaaaaacttcacattcttgaattcttctcgtgcgtccttgattcagcttgaaaagtaactctttgaattctttccacacgttcgtatgtgcgcatgagcgctcggtatcagatgtgcattgatggcttgtgattcctcaatctaggggtgagatgtgatctctgtgcattgatgttgggccagtttggaggactcgaggccggatttttgcctatagcttgagccctgagctgttgatttcatgagcgcagtttctggatccatatgttctgttatgtccctattaagggaggtgatgactggatagttacgtgatgaatgtgatgtgactgcgagatgtattcatgtgatttggaagcaacgagaagggtttgctggaggatagaaggactattaggtgctcgatttttatcttgatttgaggtatagccccgagttatgggtgtgtgaagaatctttctatgtttcctagttgggagtggagtaaatttcatgttgtggtctgagttcagactcaagaagtttaagtaactgcgtaatgtttatgatggtggaaggtatacagaaatgtttgtttgaggcaaagcaggtagggttatctcctgcggattattctgaagtttgtgtaatcccttgtgtcatttgttaccagggaaatatatgttttacaatttgaatttgggttgctcaagagagtaggctttactactacgagagtgaatgcgagatttgcagaagatataaactacaagatggtctgtgttccacgagcttataaaggattgagtttaatctcaatatggtattatggcaccaataaagtatatgcgttatgagttattgtatatgttttggtctatggcttcgagccaagtgggggagtccactattaattagtcgattgcacggttatgtgctatgttagttccagtttgaggcatgcgggtgaatcagttatcggcttcagcaccagttacttcaccaccatccgcccagccagctaggggtcaccccagagagggaggttgatcaggtggcggtcaggcccgtttctatgcactttcgggcagacccgatgttattgcttcagatgcggttattacaggtattgtttcaatctgccacaaatattcctctgtattatttgatcctggttccaccatttcttatgtgtcatcatactttgctcgttatttgggtacatgtatctactccggtgggtgatactgttgttgtagactgtatgtaccaatcgtgtgtggtgactattgggggtctggaggcccgagtggatctattattgttaagtatggtggatttcaatgtcattttaggcatggattagctatctccgtgtcgtgctattctagactatcatgctaagacaatcacattggctataccgggtgtgccacggatcgagtggcgaggtgtgactaattttccagtagagttatctcattcttgaaagcccagcgtatggttggtaagggttgtctttcgtatctagcatttgtaaaggatgtcagtgctgagactcctagtgtttattctgttccagttgtgagggattttcttgatgtgtttcctgtagacctatcgggcatgccaccaaacagggatattgattttggtattgacctggtgccgagcactcagcccatttcagtttcaccgtatcgtatggcaccagcagagatgaaggaattaaaggagcagcttcaggaactccttgataaagggttcattcggcatagtgtgtcaccttggggtgcaccagttctatttgtaaagaagaaggatggcactatgaggatgtgcattgattataggcaattgaacaaggtaacaattaagaacaagtatcatttgcctcgcattgatgatttattcgaccagcttcagggagcgagagtgttctccaagattgatctccgttcaagttatcaccagttgaagatcaaggactcggttattcttaagacagctttaaggacccgatatggtcattatgagttcttggtgataacttttgggctgaccaatgccccagcagcgttcatgtatttgatgaacagcgtgttccagtcttatctcgactcgtttgtcatagtctttattgatgatattctggggaattcgcgtagtcaggaggagcatgcggaacatttgagagttgtgttgcagagattgagagaggagaagctttatgcagagttcttcaagtgtgagtttttgcttagtttagtggctttcttggggcacgtggtatctagcgaaggtattcaggttgatccgaagaagatagaggtggttcagagttggcccagaccgtcctcagctacagagattcgcagctttcttggtttggcaggctattatcgccagtttgttcagggattctcatctatcacatcgccttgacaaagttgactcggaagagtgcttcatttgtatggtcagacgagtgtgaggagagcttttagaagctcaagacagccttgaccacaactccagtattggttttgccatcagcttcaggttcatatccatgtattatgatgcttcgagagttgggattggttgtgtattgatgcaggagggcagagttattgcttatgcttctcgtcagttgaatccccatgagaagaactaccctgttcatgatttggagttggcttccatagtccacgcgttgaagatttggaggcattacttgtatggagtatcttgtgaggtgttcactgatcatcgcagtcttcagcacttgttcaagcaaaaagatcttaatttgaaagatggttggagttgcttaaggattatgatatcactatattgtaccatccgggaaaggccaatgtggtggctgatgctttgagccgaaagatagtgagtatggggagtttggcatatattccagttggggagagacctcttgcagttgatgttcaggccttggccaattggttcgtgaggttagatatttcggagcccagtcgggtattggcttgtgtggtttctcagtcttccttatatgatcgcatcagtgagagcttgtatgatgatccacatttggttgtcattaaggacagatttcagcatgatgatgccagagatgtgaccattggtgatgatgaggtgttgaggatgtagggccggatttgtgtgcccaatatggatgggcttcgagagttgattctggaggaggcccatagtcgcggtattccattcatctgggtgccgcaaagatgtatcaagatttgagatagcacaattggtggagaagaatgaagaaagacaatgtgagatttgtagctcggtgtctcaattgtcagcaggtgaagtatgagcatcagagatcgggtggcttgcttcagcagatggatattcttgagtggaagtgggagaggatcgctatggactttgttgttagacttccacggactttgagaaaatttgatgctatttgggtgattgtggatcgtctgaccaagtccgcgcactttattcatgtatgtactacatattcttctgagtagttggcagagatttatattcgggagattgttcgtttgtatggtgtccccgtttccatcatttatgatagggcactcagtttacatcgcagttttggaggtctgtgcagcaagagttgggtactcaggttgagttaagcacaacttttcaccctcagacagacgggcagtccgagcgcactatttagatattggaggacatgttgcatgattgtgtcattgattttggagggtcatgggattagtttccaccgcttgcagagtttgcttataacaacagctaccagtcgagtatttagatggctccatatgaggctttgtatgggaggcggtgtagatctctagttggttggttcgagcccggtgaggctaggctattggggatagatttggtgcaggttgctttgtagaaggtgaaggtgattcaagagaggcttcgtacagcacagtcgaggcaaaagagttatgctaacaggaaggttcgagatgtgtcctacatggttagtgagaaggttctgttaaaagtttcgcccatgaagggtgttatgagatttggaaagaaaggaaaattgagtctgcggttcattaggccttttgaggtgctttggaggattggggaagcggcctatgagcttgctttgccacccagcttgtcgagtgtgcattcggtattttatgtttctatgctccagaagtatattggggatctgtctcatgttttggatttcagcacggctcaattggatgatgatttgacctatgatgtagagatagtagctattttgggtcgtcaggttcgaaagttaaggtcgaaggatatagctttagtgaaagtgcagtggagaggtcggtctgtggaggaggctgcctgggagaccgagcgggagatgcagagcagatatccttacatgtttgaggcttcaggtatgtttctttactcgttcgaggatgaatgtttgtttaagttggggaggatgtgacgacccggccagtcatctcatgagttaccgctccatttcccctatttcttctactttatgctttgtgtatccgtgttatgtggtatcgggttagttggatcgaatccggaatgattttggtaaggtttgagacacttagtctcttttgaggaagcttaagttggaaaagtcaactggatattgacttatgtgttatacggatcgtatgtgaattcccatagttcggatagcttcgggaggtgatttgggacttaggagcgcgatcggaatgagttttggaggttcggagtagatttaggcttgaattggcgaagttgatattttggggatttccgattagtaggcgagattttgatataggggtcggaatggaattctgagagttgcaatagttctgttgtgtcgtttcggatgtgtgtgcaaaatttcaggtcattcggacgtggtttgcttgggtttttgaccaaaagcagaattcggaatattttagaaacttaggcttgaatccaaagtgatttggttgatttgatattgtttgacatgttttaaagattggtacaagtttgaataaggttttgggatatgttggtgcctttggttgaggtcccgagggccttgggtgagtttcggatgatcaatcggacaatttcatgccttggagatgttgcagattatggtttagccgttgcagagcttttactcttcgcgatcgtgtaaggagtctcgcgatcgcgtagagttgtagtgggagcagtccagtttactcagtgcgttcgcgaagatggggatgtgatcgcatagggtgaaggcatttttgatcgcgaacgcggggaatgggtcgcgttcgcgtagagttaagtggaccaagggttttggattgaagttgttcattgcgaatgtggtagccagtccgcgatcacatagtgttgggagcttgatcatcgcgttcttatgggatgttacgcattcgcatacagttaattctgggagctgaggatttgtacttcgcgatcgcgaaggatgtcccgcgatcgcgatgaaggaaattagtcctgggcagaaggtttaaaaggtcgtcttgtccgcgaatgtgggatttatttcttccattgttggtcgttttcagagctttttgaagggaattgaagagtgattcaagggaatcacttggaggtaagattattggaattaaaactcgattgatcataggctaaaaactcgtattttagtcgttgtaacaacactttaattattgcattttacaaaagtttgagcttaatccgacttaagaaataaatttgggatgaatttaattgatttggggctttgaagtctgagtaaaagctaaataaatcaagtcaggatcgagttcaggggtcgcaaagcaagcccggatagcaaaacaaatgaaaaaatgaagcatcacaaaattttgcactgtcgcaccgtgggaggcgccgtggcagtgcaagaatctgcactgcattgtatttctccgttaaaatgcattttgcctctgtccaatccatgtacacgctgcggggggcgctgcggacgtgaaaaaattgcagaattactctatttcggtctaaaaaggcataattgtcaaaaccccttcacacacgattaaaaagagaaaagcatccattattgatggaccagacctgttttgagagagaaagagacgaggagatccatcttggaggatcaaaatcaagaggagacaatactttggatcaaggattaaaagtgtttttctaaactttcttctagtatctatttatttgatgtttgtataattatgagtggctaaaaacccaaatattttagggttatgggtgttagatgattatgttgtttgaaacttagattgatgatcttgaaattatcgttaagggttgtttatttgattctgctgttaattattttactacgtagctaacaatgaaatactatttacgaatcttgagttaaacttgaaaaaggaaattgttgattgcatatagaatcaaatagagcaagatctggatcctgggcatcgggtgaaagattcgcaattaagatagaactatacttaattgccttgtttggttgagaaataggatttgtaaatgcatttgagttaatattaataccatagaaatataggtattgatttaacttgaataggcgcataagaaatcgatagattcttctgggtattattaaccctataatcaataacccggataattcaataaatcatttttaagctaaaaacgtagcatgatctctatcaagcccataaccccgggatatctcatttattaattgttaaaagaaaaactcataagtggcgtagtaactttgcgttgtattattgtttgtctactagttaaattgtaaattggttatttatgtattttgtgatgaattagcttgaatcgataattgtttaagtttgcatcagtcgttaagttaatcataagccctcatgggaacgatactctacttattactatattacttgaagatcgcgtacacttgcgtgagtgctttggtcgcaacaagtttctggcgccattgccggggacttggaaattagctacttgactaagttaagcttttatcagccattggtttaagtattaattttcagttcacattgtttgtgccacgcaggctcttctcttgaatgcggaggagtagaagaacaagcaatctcttccctcttgatcctgaaattgaaagatcacttcatagagagaggaaggagttggaagctagatacaaaacagaaagagagttgggcattttagttcaaccacagccaatagtgatggcaggtaatggagggcgttcggtgatagaagctcgaaggccaaatcttgctaatatgactcaggctattgttaagcctgatatcactgattactttgagcttaaacagtacacggtacagctaattcagtccactaggcaatatgtaggtctatctcatgaagacccgcagaggcacattcagaattttttggaaatcacggatacttacaactatccaaatgtttccaaggactatgtcaggctaaccttgtttcctttttcattgttgggggaagctaaagaatggttgcagaaggagcctgctaattcaatccatacttgggatgatttatcaaagaaatttttaatcaagtttttccccactaaaaagacaaagcctttgcggagccagattcttgggtttcaacaacgggatggtgagactcttcgccaagcttgggaaagatacaagaaactactccgagactgtccacatcattgtcaaactgatgaattattgggccatacttttgttgatggattagatgagacttcaaagatgaatcttgattcagcttgtggacgtagttgcatggcgagactatatagtgaaatacaacttttgctaaacaacttcactgttaatgatcataattggcaaggtgagggagaaccaaggagagcaatgaaacagaaagcagcaggggtacttgaacttgatgatttttcagccatgagagcagatatagcaaaattggcaaatcaaatgaatagaatgacaatgaactagacacaacaattgcaacatgttcaacaaatgtcgatttgttgtgaaatgtgtggtgacaatcatacaagtgacatgtggccaatgaatcctgaatctatttattatgtgagacaacaaagcagaggtccgatgaaccaacaggcacaatatgggaacacttacaatgcaaattggagaaatcatcctaatttctcttaggatggaaatcaattaaatcagaatcaatatagaccccaaggaaatttcaatcaacctcaaaggccacccaacaggtagaagaaagtacaaatgatttgttgaagaaattgttgcatgacaatcaacaactcaaaactgatttcagaaatcttgaaaggaaaatggtcgcaacatctattctaatgttaattccacctagtaaatcatggaaattaagccaaaaattgaaaaactagggcttggaaatttagacttttgattggggatttgaaggaccatttaaggttggatttcagaactttttatatgtatgaactcgtggggagataaggaatctattgatgtaaaaattatcgaattccaagatgtgggcacgggggtcaagttttggtaatttcgggatttatgttgtaaattgattattttcgctcgggcttcattcccttagcatattttgacgtcctcgttctgattttggatagattcgatgcgagtagaggccgattcgaggagcaaaggagtcgcgagctagagatttgactgattcgaggtgagtaatgattgtaaatgatgttctgaggggttgaaatcccggattcgcacatcgtggtgctatattgaggtgagacacacacctggtgacgaatgtggggtcgagcactgatcgaagacaaccatgcactactattgagtagcgagagaggtcgaagcagcttttacctgattaaggtcgggatgatttccataggaatctagaagttggagtcaggtgtctatctaaagtggagttgagtatttgctcttaactaaacttctaaacattttgggttttgttttacttctaattgtatagaactacaatgatcaattaaactaaaataatctaggattaagctattgtgagttgttcaaatgattaaaaggcactagggtagtgactttcgcctaggtggttaattgacgggtacttgagtataagatatgattgtcacatttggggagtatgatacaaccattgcaagattctactcactatacacctctcggtagttcgagtgattttgtccaaattgactttctcaagaccaattgggtatgtaaatttgtaaaagcaatcaaggttcaagttaggtattattatctctaggtttaaccctttaattggggctatcaatcttttgagtacgccccaattccttgttggaccaatttcagagactcggactctctttctcaagaaaagccaaagtcaactaaacacaaactagtgtttgcaaccactaattcagcaattaaacatgaaattagtccaaatatcaaacacccctagacaatcaagcatcaaaacacaagacccatcaattacccacactagggttaagccgcaaccctagcttatgggtctagctactcataattagagaagaaaacaaagaaatagatgaagaaaaactcatattaattaattgctaaattaaacttgaagattcaatgttgaaataaagctaaaattactcaaaatagctaaaaataacgaagtcacgagcgcagccagtgtacaaaattatccgatgacctaaaatgggaaaagaagctatttatactaagctgaatattttggacaaaaatacccctgcggggttagtgcggaccgcacaaaatcacatgcagccacactagggctttggactttaataaacggctctctgaagttgggcaatgcagaccgcacataatcgattgcggctgtggtggcttctagtacggtccgcatgaaatggagcgcggaccgtattaggcttcaaacttggaactgggaactctctgaaccttctctctgcggaccgcactaaatcaaatgcggccgcattaatcctagtgcggaccgcacaaaacctcgtacgtctgcattgccttttttgcctgaatagcagcctctctgaacctcacttgtgcagaccacacagaatggtgtgcggctgcactggccctattttgcctaagcttgttttgtcttggtacttgtgcaagtttcactcctttttgagctgatctttgacatcttgtcaccttgttgatcaaacctgcaatcaagcacaacttgtgagtcttttgggactatttgtacacatttctaatcaaaacttaagcatgaaggagtattaaatgtatcaaaatccctagttatcaactcccccaaacttaagcttttgcttgtcctcaagcgaacaaaataagactcaccccttaagagaaaatccaagagaattcagttatcctaaagtgaccttatctagcatcaattgggactaacaattgccctcaatacaaatgaatcattaacaacatttactcttttaaataccatggattaagtgcaacacaagagcatcaagagttgactcaacacatcaaagaactctttctattactttggtcattgtggaacccaaactcacacatcctcagcatctccctaagtaaacctcacctttagaatagtggtactcagaacgaggttaatggaaattcactcatctctctcaaggaaaagtcacaagtccggctctaagtaccatatgcttgccccttatatgagtcaccactaatgtaagtttcattcaactagagatcatatagggcttttgtggagacatagtgaaggcttttggttccaggtaggtaatgtttggtctatgtaggttccatcttcccttaagcactttttttgtttcattttggcacacattcacttgactttttgagtctcttcacttctttctaaggggttagagagacacactgtcactctttcttatacatttcaaatcttttcttctttctcaactttcaacaccttcattctttacttttcttgaatccctttttattcaattctacattgaacattctttttgtctttttgcatttatttctttttcattgcctttctttttcttcattttatacctttttaccactttgttgccatcctcgtctctccccccaaacttatacttttgccatgtgctaaggaaagattaggtgccaagagaggatatcttttagagcgggtaaaggcttgtagcatggttcttaaaggaaaaaggtccaaggctcaaaagggttgactagggattttattattggtaggctatggaagtgtttaatctatcatttggatcaaggagagcctataatcatgtctcaagtcaaaattcacttaggatttcttctcaacaaaaattcagggcaagttctagaccaatggctcgggacttggacttgcaatgcaatttctcaccacacaagctatgggatcgctaaagacacagagtcggggacccaaaacgaccttagataagattcgagcacacaatagtcccgaaacaccacttgatgattatcggtcaacacaagagtctcaaggtcacgactttcaccaccctaaacacaacaatttgtttttgaccatgaggtcaaatgcgctaggcccaagtgacgctttgcttgaggcacccttaccactaactactaaaagcaaaacgaaaaacggactcaaacccttaagaaggttgtcacgccatccataaatgggaagagctactcggttcacacaaactccacctttggaaagaatcgtggcattaagaaaaccaaaggcttattgcaaacattcaaaacaagaagctacgaacataaataagaagctacagaaaagaaaaatgcagaaagtaaaataaatatttacatgagggaatttaatcgaatatacaatagaggggatgaatatatacaatgtaacataaactttatatacagacccaaagtaaaaagtacgaaaaaatgaaaaaatgtaatgaagtactaaaattatatacataccaaagataaaaagaaagaaatcttaaaatctgtcgaatatatacattcatccaaatcaataaaagtagagactaccccctcaaatgaaagttggcattgtcctcaatgccaactaaacaaaataagcaccaagaataaaagggaaaaggatatagagactctctatggcccgtctgtctgcatgggatcctgagtggtccctggatccttaatatgctcgggaacctcagactggttccctatggcctactgctctactgctgggacctaggcctagacctagacaggctcctgggctgcatcctacgactgactagaggaggtctccggtaggtctgccaactggatgactgcatcatctgctcggggaatcatcctcttcctcttgggaggcctctgggactgctctagctgagggtgagatgttggcacagggtcttgtagcaataaatccaaagcgtctttctgccttcatcctatcaaccttaaccctcaactccttcacggactccttggaagcccgcgtctttctcatcttcttggcctccctagcaagctctttgagagcttttccatatgactccacagcgtccgtaagaaatttttgagtgtcaagaatttttttctagttgtccagaatatccttgagggcatcctcatagactgtaggacctgtagaggtggaggtgtcgactgagatgctactgcagtagtgagggcaaacaacttagaggaagctgtctgcatccaactgttgatgctaagaagggtctggcttagacattgtgcagtcactggatgagccgaggtagagggtatctctagagctgctaaaatggatggaccagggtggatgtccattgaggtggaggcaagatgagtaggagccactaccacaactggctcttcagacttgccagttggatcagtggatgttcccttgtagttcttgcctttcgggttgtcatcaccctgtatgttataccatgagaacggggcctttgcttttaccttgatatcaaatggccgcttttcaactttgcggtccctaaagtacatggtcaagaagctagggaagggttagttctatcaccttcactaactacctgtgtaatcacccgagacatcaccttcccgacgttaattgggtaccctaccatgattgatgctaccaatactgcccggtgaagagggagtgagttttcatgagtagtggggtccaatctgctacacacaaatgtttcccaccccttggcctcgaaattcaaacttcttatcaaaattttcactcccgcattcaaccaatcgggggtgatacctgggtttgccagatactgtgccaaccaaggacagacctcctcacctaattccatcttttccaaatacagcgactcatccttctcatcgaagtccaagtagtcatttattgttttcctatcaaacaacactttcaaattgcacaccttggtcactttggtgcccttcttgatgtgggcaacattggtgtagaattccttgactaggtgctcgtttgcatcctcacaattgtttaagaaatactcccagcccactctatctctaaattgccttctcacattggggttgtgaggcaaaaggtttctatctacaaaaattctctccgaaattaatttcctcacaggccaccattctttgaatttatggtaggccacctcactcacaaagtggtcttgccacacctccggatttctagttcgttctaccctaccaacctggggctgacccccttctcctactacctcttcttcccctactacaccctcttcggataatgaagttgtgggagaggtggagtattcatccccactaccttcagctgagccctcagacgaaccagaagatacatttactgacgcttggacagtggggaaaggtggaagagtgtctcttagtctgtttctctccggccagtcagggatgtactctgggattgagtctgaagatatatctcgggagggctcgtattcactcccagactggtcaatggacctatcagcagctttagtgagcttccttgtgtttttaatgttttgtcgggcttggggagtcaatcttagcatcttctgtttccctccccgggaggactctcccctgcctggttgtttagaacccttgcctcttgtttcaccattgtctgcaaacaacatccattagacttgttagtatcagtagaagaaattaagttcacaattgtagaaaataaaaagatgcagacagtagcagatgttgcacagtgcggaccgcacaaaatataaagcggtcgcatagaggccaatgcggaccgcacaaaaatgctaatactgtctgcatagaggtggtgttcagactacccactctctgaacaattgcaccacggaccgcacaaaatggtaatgtggtccgcattgaggcaccgtggaccgcacaaaatacaaggcggccgcggtggcaaacttcagagagctagtattttcatcctttatcaatgcggtctgcactgattttgtgccccccacactgagttatttgcggccgcacacaatgtagtgtggtccgcattgaaaacttcagagacttgaataatttttccaccatatgccgcactgcataaacacaaacatgtaacatctcacaaccggtcaacctaaaaataaatcctatattacaatgaaaatcaaagaaaaacaagaagaaaaacacatgggttgcctcccaaaaagcgtctgatttaacgtcgcagcacgacgcaagttaccatcaaatcatttgagatgaagaagtgccaccatgtggctatcatcagttttgccgaagtagtgcttgaccctatgcccattcactctgaaaacttccccatttttgttctttaaatcaagtgcaccaaacgggatcacacataccacttcaaaaggtccactccatttcgacttaagcttttccggaaacagacgtaaccaagagttgaacaagagaaccaaatcacccactttgaaatccttactacgagcatatttatcatgaaggtacttcatcttgtccttgtacaaggaagaactggagtaggcatggaatcgaaattcatcgagttcattaagctgctccacacagagattggctgcaatatcccattcaagatttagcttccataaggcccacatggccttgtgctctaactcaaccggtagatggcaagctttcccaaacaccaaccgatatggaaacataccaatcggagtcttgtaagaatcttataagcccatagagcatcatccaacttctttgaccaatcgatcctataagcattgaccgtcgttgacaatatctttttgatttccatgttgtagacttcaacttgaccacttgcttgaggatgatagggagtagaaactttgtgattgacaccatactttgcaagaaaaatgtcaaaagctctattgcaaaaatgagaccccccatcacttatgattgcacgaagagtaccaaaccttgtaaaactgctcttcttgagaaatgcaacaacactctgcgcctcatagttgggaaaagccacggcttcaacccactttgaaacatagtccaccgccacaaaaatgtatgtgttcccacatgagctaacaaacggacccataaaatcaatgcctcatacatcaaaaatatccacctcaaggatggtattgagaggcatctcatctttcttcgaaattccgccccctctttgacattcgtcacacctctttacgagttcacttgcatctttgtacaaagttggccaataaaatccacaactaagaactgtggaagtcgtcctcgccccgccattatggccaccatagggagaggaatgacaaacctccaagatactcaatttctcttcctctgggacacaccttcggatcacaccatccgtgcaaatcttgaacaagtatgtctcataccaatagaaatccaaactatctcgcttgagcttcttcttttggttagaagagagctcacacgggattataccagtcacaaggaaattagcaacatctgcaaactatagcattccattcatcgacaccgaaaggagttgttcgtcgggaaatgaataattgctttctaggccatcacgaggcctcccctcctcctcaaagcttgaagtaacaagacccatcgcatcagtctagctttggaatccttcttcgtcatcaagtatcggagtgcggcatgatcggtatgaataataaccttagcacccatgagatacggccgaaatttttccattgcgaacacaatagacaaaagctcttgcttagtcaccgtgtagttcacttgagcatcatgcattgtcttgctcgtatagtacaccggatgaaacattttgttcactcgttgacccaaaaccgctccaaccacaacgtcgctcgcatcacacatgagctcaaagggcaagctctaattaggtgcggtaatgataggagtggtggtcaacttatgcttgagaagttcaaaggcttgcatacatttttcatcaaacacgaacttggcatctttttctaacaacttgcacaaacgattcactaccttcaaaaagtctttgataaatctccggtagaacccctcatatccaagaaaacttctaactccattgatagatgtagggggagggagacctgaaatcatatcaatttttgctttgtctacctcaataccatgctttgaaattttatgcccaagaactataccctcttccaccataaagtggtatttctcccaattgagaacaagattggtttcttcacaacgggccaaaactctatcaagattcttcaagcattcatcaaatgaatcacccacaacactaaagtagtccatgaacacctccaaaatgccttccaccatatcggtgaaaatggccatcatacaccgttaaaatgtagccggtgcattacacaatccgaaaggcatcctagaaaaaaaaatgtgctatatggacaagtgaatgtggtcttctcttgatcttctggagcaatcaagatttggttgtacctagaatatccattcaagaaacagtagaaggcatgcccagcaggtcggtctaacatctggtcaagaaaagtcaaaggaaagtgatccttgcgggtcactttattcaacttgtggtagtccatgcataccctccaaccagtgatggttatggtaggaattaactcattttgttaatttgcaaccagggtcatgccacccttcttcggtatacattgcaccggtgaagtccaagagctatcagaggtggggtacataacccctgatcacctcctttttcacaacttcttgcattgcctggttcaacttcctttgatgctccaaggagggctttacatcatcttccagaataatcttgtgcatacaaaatgtggggcttatcccccgaatatcagctaaagtccatccaattgcctttttccacttttgaagcaccgctaattggcatcaacatgcatgttagtaagacaagaggaaagaataactggcaaagtagagtttgagcctaagaactcatacctaaggtgtgaaggaagtggtttcaaatccaacaccggaggctcctcaattgaaggctttgttggtggagtcttcctattctcgagatccagagatagtttcctaggttcataagagtaagagcccatcccatgtaaagcattcacgcactccactcggccctcatcatcattgacatcaagattcaacaatacggcctccaatgagtcctccacattgatcattacactggtgtcatcaattatcactattgtgacgaggtccataaaagagcacactttggtactgttgggctgtttcattgacttgtaaacatgaaagaccactttttcatcacccacccgaaaggtgaggtcccctacttccacatgaactaaggccttcccggtagcaaggaaagatctccccaatatgataggaacttcataatccacctcacagtccaagatcacaaaatcagctggcaagataaatttgtccacccggataaggacatcatcgataatatccaatgatctcttcatcgttctatccgccatttgtaatctcatggaagtcggcctaggttgcccaatacacaaaattttgaaaaccgagtaggaatcaaattgatactagcccccaagtcacatagagccttggcaaaatccgcactcccaatggtgcaaggaatggtgaaagcaccgggatcttcaagattcgggaccattgattgcactattgtactaacttggttagtcatttttatagtttcacaatccatagaccacttctttgtcaccaagtccttcatgaattttgcatagcccggcatttgctcaagagcctccaccaaaggcacattaatggataagctcttcatcatgtcaatgaactttttaaactgattctcaattttctacttatcaagactttgaggataaggcggaggtgatcttggaaaaggtaccttggctttaggcaccaccagctccgacatatctattacgtgttccctagacgggttcacgtcattttgagtttccacctcggcatcttgaatatcaatcatcacttcttcattcatattgtcatctatcacattttctacaaccaaaggaacttcatcttcttgcaactcaatatcatcactcaaaacttgcttttgtttagaggcattcacatcaccgcctcgtccactccttgtagttactgccataacatgattgttctcaccctttgggtttactactatatcacttggtagagcacccttagggcgtgtattcaaggactgagagatttggcctatctgaacctccaaatttctgattgaggtattgtggaaagccaactgtgcatcagaatctgcatttttcttcatcatctgttcgaacatcatttcaattctacccatatcattgctagaagaactaggaccttgggatggaaatgggggcggattgttcggttgctggtacattaggggcctttgaaagccttacccccggtttccttggtttctattgttccatccaccttgattgttattaccaccccatttattgttatcaccattccaatttccttgatggttttgattgttgttctgatcgccccagttgttgttttgattgtttctcccccaattaccattgtcgtgttgttgttgattgccccaattgccttgggatctccattattgttgattgaaagaattgcccctctggccttgataattaattattcatatacggcacctcctcattttgttcatcataaccatcattttggaatccaccacaactattgtcaaatttctccgaattcccttagttttgttgccctctttgtctttttttgttgacaagcatgttgacaccctctatagcattcacttggcgaggattttgaacttgctgcaactgtgcctttgctaattggttcattatagttgtgaactcagctatagtctgcccatgatcatgtaactccttgtgcaaatgagtaatcgtggggtcaccctggggcacattagctctactttgccaaagtgtcagccatcttgtcaagaatgtcacaagcctcatcataagagagcttcatgaagttgcctccagcaagttggttcactatgcattggtttgtggtgttaataccccggtagaaagtctgttggatcatcaccttggtcatatcattgttggggcagtccttcaccattgttctataacgctcccaaatctcatgcaaaggttctgtgggatcttgcttgaataccaagatctcatctctcaatgcatccatatgccccggtgagaaaaattttgcaatgaacttatcagccaactcatcccaagtagtgatggaatggttgggaagtcgctcaagctaatcaagtgctttccctctaagtgaaaatgggaagagtctcaaccaaagtgcatcctcggacacatttgtttgcttgctcccccaacaggtatccacgaaccccttgagatatttgtaagcattttgatttgcagcgcctgtgaaatacgcacactgctccagcaatgtcagtatcacattggttatttgaaaatttcccgcccggattcggggtggaacaatagcacttgcatagccttggttcggaagcactctaggagccactcttggaggtggcggaggagggtctggaatattatcatttacattagcattggcctggcggcctctacgttgtccttgaggtacaagaggcacctcatcatccccgatatcatctacctcctcccccacaatcacatttccaagagggccattggcgttgtttgcttccatttggtacctgaagttgtgacacacacaaattagtaacaaagaaggaaagaagaacaatacacaaaactatttagatagatagccaaaaccgttagctccccagcaacggcgccaaaaaggtgatcgaagctaaccctacactactattgagtagcgagaaaggtcgaagcagcttttacccgattaaggtcgggatcgatttccacatggagctagaagttggagtcgggtgtctatctaaagtggagttatgtatttgctcttaattgcacttctaaacattttgagttttgttttacttctaattgtatagaactacaatgatcaattaaactaaaataagctaggattaaactattgcgagttgttcaaatgattaaaaggcactaaggtagtgactttcgcctaggtggtcaattgacgggtacttgagtataagatatgattgtcacatttggggagtatgatataaccattgcacgattctactcactctacacctctcagtagttcgagtgattttttccgaattgactttctcatgaccaattgggtatgcaaatttgtacaagcaatcaaggttcaagttgggtattactatctctatgtttaaccctttaattggggctatcaatctcttgagtacgccccaattccttgttggaccaatttcagagacttaggctctctttctcaagaagagtcaaagtcaactaaacacaaactagtgtttgcaaccactaattcagcaattaaacatgaaattagtccaaatatcaaacacccatagacaatcaagcatcaaaataaaagatccgtcaattatccacactagggttgagccacaatcctagcttatgggtctagctactcataattagagaaggacaaagaaatagatgaagaaaaattcacattcattaattgctaaattaaacttgaagattcaatgttgaaataaagctaaaattactcaaaacagctaaaaataacgaagtcacgagcgcagccagtgtataaaactatctgatgacctaaaaatggaaaaagaagctatttatgctaagctaaaaaatttggacaaaaatacccctacggggttagtgcagaccgcacaaaatcacatgcggccgcactagggctctggacttgaataaacggctctctgaacttgggcaatgcggaccgcacagaatcgagtgtggttgcgatggcttctggtgcggtccgcatgaaatgaagcgcggaccgcattaggcttcaaacttggaattggcaactctctgaaccttctctctgctgaccgcactaaatcgagtgcggccgcattgatcccagtgcggaccgcacaaaaccttgtgcgtctgcattgccttttttgcctgaatagcagcctttctgaacctcacttgtgcggaccgcacagaatgttgtgcggccgcattggccttgttttgcctgagcttgtcttgtcttggtacttgtgcaagtttcactcctttttgagctgatctttgacatctttttaccttgttgatcaaacctgcaatcaagcgcaacttgtgagccttttgggactatttgtacacatttctaatcaaaacttaagcatgaaggagtataaaatgtatcaaaatccctagttatcaagcactattggggattgtgacttggtccgtcctgattgatgattttaccgcctatttgactgaaatctattttctatcatcactatttgggctgaatgccatatttgggcttcgtgctaactatttgaacccttcggtgatttttattgatatttcctcactgttttgactttatgcttgaactcagtcatgttattttccattgttttcatactcagccatgttttactcagtttttatacttaaatgatattttaaatgatgtttggactgagaaacactgttttactattgctcgagtggcttgtgaggatttttgactgagtaaggtcgagggcctatgttgtgaggaaacatttgatactgattatgaggccgagggcttgagatatgtacgccacgaggtgggttgattgatatgaggccgagggcctagtgatgatgccacgaggtggcttgatattgcgtttgggccgtaaggggcccctccaggagtctgtacacccccagtgagcgcgggtacccattgtgatacgagattgagcacgaggggctagtattgttctcagatactgtcatcttcttagatgttgcccgagggacggatttgttgatactgtgcccgaggggttaacctttatgtgtttattttcataattgactatcaattacctgcttaattgttgaaaaaggcttttcaggaagtaaatttgagttacatgatttttacctatctttcactggtttactgttttaaaaaggattttcactgcttcattatagcatgcttttgtgccttacgtgatttcctgctttcagtctttatttatgattattactcactgagttggagtactcactttactccctgcaccttgtgtgcaaattcaggcttatctggtcccgctcccgagtgttgatcattctggctcaggcggatccgaggagtctctaggtagctattggcgttcgcagcccggagcttccctatcatacttctttatgttcttagtttctgtattaaactctgtagtttgatttgtagtattctgaattgtttagatgctcattactagtgacaccccggtatcgggctgtgtttgggctgtatttcacatattatactatcaattgcttaaactttggtttatttcttcatgtttagacggtatcttaaatgcttaattgttaataatcggataatggaaagtgtcggctggccttgtcttcacgagaggcgccattacgaccgggtctgggttttgggtcgtgatacattatcaatacaaggaaaagaaaattttcacaattctttcatgttttctttcaggggtaggtttgagggaaagaaaaaaacctccatattttatgtttactatttcaaaaaaaaaggagaaaaataattcaaaatgaattagtgaaatagagaaactaaggagaaaattttttcgtgtagctgtaactaactgccttgccaatggcaccttgtacacttctattaatgcaggtgtcactgaactatttaggaatttgcaattaggttctgatccgtcacaaatccgtcgaggatgctatttttatggttttgcgtcggattggtccgtcgcatattctaaaaatttggtggtgaaaaaacactttgatcgaaaactatcgatttatatttgtctatttatatctatattattataaagtatgaatacaatgtcggtttacaaaaaaaaaattataatattaaatataataactcacaataaaagaacattactgaaattcttgacattaatattgtaatcctattaattttaggacataagactacacttaggaatcctaaataaaccaaacgaagaaagacaaaactccaaattggaaggaactattatacattcaaagtcataaaactacggtaggtttatggcttcatatatagcaagagagttcttctggtgtgatcttttaagcaactaaaagtaaaaaataacaaatagaaaaaaagatgtaatatgtcatatatctatgcataaagagtataaaatttatttaaaagttaaaacacaaaagacagatgttgtccttttcattttttatattttttgctttttaagtaatatcttaatttggtctattctaaattttaagttgcaacaggtaagtcattgttatgtttactactttagtaaatcagtataatatttgaaaatatgtaggtattctttattttgtttagcgacgtgattatttagttaaaaaaaactaaatggaaggtttagagataggtcgttgaattctctttcctttatattcagtaaacaaaaattacttttatatcgtaaaaactgtgaacagactcatgaagattaggtgcaaagatcaaatgaaagcaactaccatatagttttgtgcttacgagttaggaaaattatgcaattgataatactgctaaaacttatgttgcagaaagcaaattcttgtggtgctaaaatactgagttttcatctgcaacattgtactcttttattttatcttgcagattttaaggtgagtttaacgttttaattataatttgtaaatatgacatacttttattttctattttacatgtaaacatagttactctataaggcgggaagaaattaaaagtgttaaacatacgatctagagtttagaaagaacgaatgagtcatgctcattaaaatagaatctaagattttctcttgtgtttatttatttactatacttttatgtaatatctatttataataccgtcaaaatgacttgtctcttcatgttttagtttcgattaagatcaaattctttaatttttctggattttatagtatttgttttaattaaattagaatgttaacctttttgtttttttccatcgtaccttttaagtaaaaattaaacagtataagcaaattatatagtataattatccataaaaaagaaagtgaatcaatatggatatcttacaaaataagagaagaggataagaaagaacagaaataaccatcttaaagttgattgattatcttttgcaggtaaatataaatttatgttgaaagaatatttgaaattcttcctaatgcgtatgaaaaagactaccatgatgagaaaaaaacttatggaaatggaaggaatatattttttaaatatcatagcttattctttgtgatcactataacaattaaattaatttctaataatattattactgtagacatttagaaataaaaaaagttagccactaatgctatcatcattataatagaattagttagtctgtccgcgcttcgtgcggtcataaaaaggtgaacttatgatgtgatcttgttgtaaatttaggtgagatagagtcaacaaaatatttcaaagctcctcatattacaaatttcacgactaatttttattacatatgaaaaatagacaaatgattattctctaacatatgattatgaacatcactaatcccaagagataatatttaaaattgaaaattttcaattaacagaaagcctccccacgtaaaaatatcaaattcttgaactttgctataaagcattgaccacatcgttctctacacctgtatttatcacacaaatgtttggaatggtcaaagcttctatatatgcacatacttatacttgcgattacgtatcttgttagttgatcatcaccaaagtgtcatccatatgcagttatgttaatctccacctccaatggtgtacgtaaaattcaaagaccaccaaaatcaaaagaccaaagacattaagatcacccacgtttagtttagactatagagctatctattacgttaaagtcttgtcaaagaaggttttatttatgtcaagaatttagtaaatctggtaaattatataaatttaactgaattaaagtataaatttataataactaacagaggaagtcctctccttaaagcatcaaccgtggtttctccagttcttggtatatatagtgatgaacttcgttggagatattacttttgaattgcaatatgaaaaagaacacttcaaagttcaatagcaatagttgaacaacagccatgactgcagaaccaatgatgaatagagaggaaaaccattgttattccatgagcaatgattgttgaacaatcctgcagtttgtgaacaaattaatgagttttgacaacaaatattttacaataaacgaaaaaggacagagttcttagtgtaagagtttccaactgttagtcgtgataaacataccaagaataattgccattaatataagattatcatgagaaagaatggatattgatttggctatacttgtagatatttcaatgttccacctgaaacgattgaaaactatatgttgaaagagaaaaagtgaaagagcaaaacaaatggcttacttacaagaaaattaatctgaatggctaaaaatgtccggtgaaaaagaagtacaaaaacccaaaaataatacagtcatttcaagaattcattttcatgttatggattttcagatctgtaagaaacgcttaagatcacacaggaacgttgaccactatccaattcctctccattttcttaatatgctctttgcttcttcataaccatttcttggcaattttaaagaaggggaaaactgtagcaaatgggtactaaataccggcaggtgggaggaattaagaagaggctaattaagtgaattaaagatgtgaccgttttcttgtaacggaaaagaagcgtgttcagtttttcttagtagaacattttaaaaaatggaaaaatttaaggaaaatgctaaaaaaaataacaaaaaagataaatagtaatgctggtcaatggagggtgccacatcacttattctatccccaactttatatatatactagggaatttgccgcgcgtttcgcgcgatttcagaaatagcagcccatttcgaaaggattttatttataaatttattaagaattaaagatagaatttttcagctgtttaactaaaaaactaattttatatattgatgaaaaaaatcacaagataaatgttcttgtaaaattagagcttagaaaactacattttttattatcaaatattcttaaaaatgaaaaaaaaacttttaagggaaaaatcatatatttttttgtggagagagattaatacatgattctcttagtcttatatatttcataatacatgatctaaggacttgatgtttttaaattttattagatattagaacttttgtttgatgaacttgtcttctattcaaataaataaaagaaaataaaacgaaaagcaacgaaactaagtacccgtttggacataaaatttgatggaagatttcttcaaaaaaaaatcacttttttttcgaaatcagcgtttgttcataaaaattttaattttcacttgaagatgcatttaggaaattttcgaaaatttgaaaaattgcaaaaggttgtttttcaaaattttcactcaaatcactcataaaacttcaaaaacaacccaaattgaaatttatatccaaacacaattctaaatttcaaatactattttcactttaaaaaaaaattcaccatttttttgaattttataatttttatgtccaaatgcctactaaaaagtccggaaaaaaaacatattacggacaatgcctgcttgtacacatttaatttccttcacaatcttcccagaagcaactaattagtagtaaatccaagaatttttctcacatcacttttcagtcacttccaatttaaccaaaagaacataacggcacatttacctcttagttccatctccaccacattcaagctaagtttctgcttacactttttaataaaatacatgagatgggccttcacggtttttttcagttgaaattaaaaaattattttttttagattttttatttgtaaaagataaatctcttatgtgtaaaacatagatctctaatgtgtaaaaacaaatctcccataagttaaaaaaaaaaaaaagaccgaatcataaacctaaaaataactttgtaatggcccacaaaatcatttgactgcagttataatatagttatatatattccaaaatagagggaatgggaagtattaattattacataaaaagaaatagaaaataattgatataaaaatttataataaataaaaacgtgctatcacttcaagaaaatttataccattagaaatcaaattagaaattcacttctaagatcccaaagaagaatgaaacaataaagaacaacatcaattaaaaatcataattacctgtcaaacacaacgcatcaatgaattaccaaaaagcaaaaacatgataaataaaatggcatccaccatataagagaaataaatagaacaaacaacacttgggaacatttattgtcaggcaaaaataaaacatcaatgaattaccaaaaaataaaaaattatgataaatggatttacatccaaggtagtattgttctaagcctacaattacaaacagataaagaacctgcaagaaaagaagattccaaaagaacgaaaaaaagaatgaaaaaataagttggtggtgagcaactgattaaatttgtgttactttcatctaaagactatttagtttgtatgatactaaataatgttccaaatttattcacggtaaaaaattaaatatctgtatcttatatatatgaaattttcaagaaagatacctggaactattccgagagcattcacagtttgaaagtttgtttggtataataacatctgcagttgcaaaatttcccgtattggcgaaaatatgaaatttagaattaccttatggaacatgatgagttttgactaagcttgttgggaagctgacagaaccttgtgtctacagcctctagcattttgttgggttgttactaccttcaaacgttataattattaggaagaaactaaagaggtggggaaaagaaaaggaagagatagatgcgcaataaagagaatttagagtgaagcagtaattattgagtcatttaatgttatcaaataaggcacataaaaatagaagaagaagaagaagaagaagaagaaaaataagaggaaaaaaaaaaagataaatgtgtttcttggccacagaggtatgccaaatcatcttgcctatgcccacttatatatatatatatatatatatatatatatatatatatatatatatatatatatatatatatatatatatatatatatatattaaaagaaaaagttgcaaatttgttttaggaggagcataattttcatcatattctatttttattgtgaatagaaatattataaagtcttaccctttgataaataaaacttcttatttcctataattgttgtagaactttgattgaataacgtgcaaccaaacgtgttcgcacaagaatttaacttcctacactaaaaatgactaatattttttaatacttttacaacaaatgctcacggctcaatccctaatattgaattatttgtcttaccatgattttccatttgggaagtaacaaaattggaaatgtatacttagaacatcatttttaaattaaaaattattaagaggatatgattctaatattttgttcctcataaaataaatataataaaataaaaataacactaactaaccttaaaaatttatacgattgacgggaatatcgtgcaacgcatgtttgctcggagttctacagatatattggatatcaatgaactgtttggtgaaaaaataatcaatcatattaaatatgtttaaactataatatataattatctaactaacataactaaattgatcatttgtgtaagttctgatgatgtctttttattttgaatttatgtattatgctaatgtaataatatttttcactatttagatgattgttgtattattatacataaaatttatgttacaccctgtaactttaacaaacttgataccgttatatatgtatttgatatggtattttgagtaaaatatttttgtgatgaaaaaaatagtttgaaaaatatgactttatatagttattaatattactactttcgaatatgttttaaattatacacctaatatgagaaaagtttatgggattcctttttttgtaaagatatgaattattttcttacaagaaaagaaggttattttttttttaccattttaagaattaaggatacgaaaatttgtactctttatgtgagattaaaaaaattagaagttgagaaaatttatgcattttttacacgtatgttttaataaaataataagtgtatgtatttattttgtatggcaccacatgaccatgataataaagtatattatatgttattgtatgatatataaagtgtattaaaagtgaatagtactttaagtaatttgggataattcttaattgtgtgaataattgggtaattaattcaatattttggataagcttgctcatccttaacgcggcagcaagccaaccatatatgattatgactccgacgaatgcggcaggccgaaaatgacattgcaaacatcagtcgtgactccgacgaggaccgacaaacggcagccatcgaaactgccaatattcatggcaaatttgaggacctccaacaggagcgtgccgacgatttagcccatcagcaacatgaggcagacagactgactgccatgcagcaaaccataaacgacttgactgacaagctcaacgttgtcaatgctgccttacagagcctacttcgagaaggcgatcatcacatcaggggtgcaacaaacctcacccccattccacaaaagcttaagttggtcattaattaataatagatgtggcaagtttagaaatgtaaggatttggcaaatcttataaagtgagtcatttatccacttttaagaaagagttaaatattcattcctaacatattcattcttaagtaagcaaataagttctctttgttatgaaataaaagcaatttagtaaaacgtgaacaagaaatagagatagagagaaggaagagattttcttcttcaattgtgtgtattttcctatctattacaaggcctttatataggcataaatagtgaagaaaatatgtcatggaatatgtcattgaacatacaaattatgtcattgaatatgtcattaagcatttgagatgaagatcatggaggaagagtagacatccaccataatatgatatttatcataacactcccccttggatgttcatagataatgtgcctcgttaaaaccttactaggaaaaaaccctatagaaaaaaaattatagtgaaggaaaaagagtacacaggtttagaaatacgcattttggttgccccgttaaaaaccttgcaaggaaaacccagtgggccaaaaccttgtaaggaaaaaagagtacaacgcatatcaactccccctgatgagagcaccaattcacatccttgatcattcacatcccaatcttgaacactagtttcttgaaggcgtgacaaaactttttcagttaatgtcttagcgagataaagctctactcctacaaggaactctagagggtgtgtactctatggagtgacctcacaatcatcagggtactctatggatgtgctttatccacatagaatcactttaaaatcttttcagtgtatgctgattgatggacaaaaatttcatctttcatatactcaatctgtaggccaagacaaaattttattttttgtctttaaaaaatcattcatttcaaattctttctttaaacagtctactgcttcaggaagctccttgggagttctaatgatatttgaatcatcaacatacacgacgattataacaaattcaaatccagatccttttataaagacacaaggacaaattgaattattcttgtaccattctttcaacaagtactctcttgggcgattataccatatgcgcgctgattgtttcaatgcgtataaggattattgaagctttatttaataaacttggaaaccataatatgcttcagaacaatttaaatccttcaataatttccattatacgcatatcaagtttttcatatattgccagattaaaacctgaaatgccaggatatttataaatcttcttgtgacacaagtcgtctttatgtctatcgacttgtctttcttcttacaagaacacatttataccttcactggctttatactttcaggtgtttggactatccgtccaacttcacatttttcaggtgaaatcaatcttgattgcgtattttttattttattttattttggccaatcatttatctatccaaatttcatgacagatttgagctgaagatcctcgtcaatattaataatattgagtgcttcattatattaacaatatcgtcgacgatcactttacgtcggttccattattacctaataaagacataacttattgagatctctttatctcattgttttcaggtaactgagcctctcacatgaggtcttacgaagtgttatatcgtggtgctcttctagatcacttgcctccttattatgaccatctcgaacattttcccctctccttcttcaaggagttttatctttggaactgattggtctgttacgcttcatgcgtgccatagactatgtccctcatggacgttattctatttggagtattagcagctgaaatatgacatttagctttggtcagcaaatgcgtctggcaataatttataaattaattatcacttgaacttcaagttcatattttcttgtacgaggatctatatgtattcataataattcatttcacatatcactttctcagctatccattttctccccctaattttgggatcaccaacatatttcccaaccttctttgggaacccatctttgtgcattgtggtggcataattaaatcatatagcacattcatatttctatatagaaattatttggttcctgaccctgaatcgattgtgaaagagagaaattttcataacatggctagatgcgtacaagttctggtgtatattacataatacatctcatatcaaatttcatttttgggagttttgttctcataaccaataatttagctataattggaggcattccgctaaaccaacatggatttaaaccagtattatcaagataaatcatcataatttacattctggagctgtgctctaataatttgagcaagcaatcttgcaaaagccaaactgcaagttgataacaaatgcacatgtcaccatagaatagatgcacctattaaaatcatataatagaaaacgatccacatggcaggtgactgggcccatatatttatcaccttttattcgttctagaaatcaagggattcaatcccaacttttaactggtatatcatgagaataagcagcgtaagggaattcttgaagaatcttctattacttcaatatatgccaatgtaattttcaattaattttccgcatcataattgaaccgggatggtcaactggtcatgccaactaatatttgttttagtaaacctctagcttgtggcatatgattccagcatcatgcttatatttgtgtagtacaaatagaaagaaaatcgagtaacctttcatatttacctggtataattatagaaatatgaagatattcaatcttcctttcatttatagtctcaatatgccaactactttgacttatacatttgaaactcaaaaagtttcttttgagactttacaatatcaatgtcatgaataattttattcatctagatagtaaaaaattactttccggagctcttaacaatttttgtactacaagatcttttgccacaccattcatatgataaatgattccttcatgaacaaaattatatcataataaattgtcattgtcaaaatcatcataagcaacgtcattttttgctttaattttgctcttaataacttttataaggaataccaaaatattttggggtatcacatgtacgagaccaatgacatattcatgtaaccacacaatactatttattctctttatttctctcaaacctccctcaaaggtgagttgtgtggtactcatccaatcatgtcttgcatgtctttattcattacttttatcatatattactacattcacctttaggaatgggtctacattctcaatgtttatcactagtcacattctcttcaaggaatggatcataatcagtgacgtgcttcataccaatttgatggtaaacattgccttcacattttgaaggattattttgagaacccttgttgttctccttttataatcattgcgatgattattattatttggaacactcgcgttcattgttcaaccacttgtcttcatttagacttattatgcactgctaccacattcacttcaagaatggagctattcaagtgggacaatcttcatgccttttcatgaaaaatattttttttctttagtcatcattatatcatcaatatggtacattgggactcaaacccaatgtcttaccaatataaagacatgttacgccataataaattgggactcaaatccaactcttatcattatggagcatcaggacttgatcccgatgtcttaccctcaatcaatggcataataggctaaacaatattgagattcattcccaatccttaatttcaatcacatgccaagaaagttgtacagagttaatttgcaacttagcaaatcaaatttgctttcttaaataagtgtacaaatctcaaatcagtgtaaaagctttatcaattatttgtagcatctatatgaaatacaaccgtttgtaatcagaatatttcttctatattgtattagagtttaaatggatcataaaataattatcataatatttattaagtctctctcaaaaatattgttgttttcgggatatatcctacctattggatttggtttaacgccatgactttccttcactcaattcaaccaagcaattagtgaataaatttatcaaaagtacaacatatatgtaacaacagatatatagtactaatacataaattcaatatttatattacctgaaaagtgacattataggtaacaacttaccagttgtagcttatggatcattcatataaaatacttgaaaatggtaagtcagtagcaagcatcaagtagatcatgaatactcgaaaatatctctgctagtagtcatactaatcattgtttgctttcaaatgatacgaccataaattatgaagtatactttctcaatagctggtttgttttccaaatttcaaagaagtaattaatcaacctagataaagatgtgaagtatttcttgttttcttcaagatgatttatgcttctaatcagtatgaccaattttattttatttttaattttttttattcctttttttggtaccatatgcaagtgtaaaaagtttggtactatatgcaagtggaaaaaggatatagcatagatattctgatgcacaggataatcaagatgtggttcctttattactttttacctttccccataaattagctgaactaaatccaaagaaggataattgcatagatattgtatatatttttgaattctcgtttgctaaatgcttgaaatgatttttggccacgatcttctctccatgttgtatgatttgcgtgccaaatttttgtgtcgtctgtactgatggttttttgcactggtattgctttgaagtttgaagatactttaaattaatttcccacacctgcaataaaaaaaggaggaaataaatcatgggatttagtcaagaggggaggatgtgacgacccggccggtcgttttaagaatttaggcttgaaatgccgaaagttgaatttttgaagtttccggttcgataatgagattttgatccgagggtcggaatgaaattccaaaagttggagtagctccgtagtgtttaatgtgacgtgtgtgcaaaatttcaggtcattcggacgaggtttgatagaccttttgatcgaaagcgtatttttagagtttttggaatttttaggcttgaatccgatgaaaaataggtgttttgatgttgttttgaccgttctgaaggttggaacaagttttaatgatgttttaggattggttggcatgtttggttgaggtcccgggggcctcgggtgtctttcggatgctcaacgggtcatttttgaacttagagaattgcagaaaaatgttgcagcagtcagttctggtttccttcttcgcgtttgcaagtggggtctcacattcgtgaagaggagctggggatgttgaggaattaacgcttcgcattcgcgaaggagcttacgcgttcgcgaggctgagggactttgtgcctatgcattcgcgaaggcagtctcgcattcgcgtaggggaagagaaatgatcatcgggttcgcggctcaggcatcgcgtttgcgaagagggagactggtgtgtggaactttagtgcatttcactctcgaccgtagcctcgcgttcgcgaagaagaacgcgcctgggcagaatgtttaagttcaaaatcgagggtttagccatttttatcaaaacttaagcttgggagctcggatttgagcgaaattttgagggattttcagagatatcgattgggtaacgattcttaactccttttttcttgtaactcattaatacaaacgtgaattcatcatttaatttcggattggagatgaaaattaggaaaaagttagaagaaagttcttagacctagaattcgacttttgattgggaatttgaccttagatttggataattttggtatgcatgaactcgggagagtgtgaggattttgaaaatataaattttacccgatttcgagacgtgggcccaaggggtgttttagttattttacctaatttcgcgtattagcttagaatttctttgtagaatcagttacttgaagtgttatttacgttatgaaattgaattgaatagatttgggtcatttggagtcgagtactcgtggcaagagcgtggtttcagattgattattgagccagttcgaggtaaatggcatgtctaaccttgtgggggggaccttccccttaggattggtatatttggtaattgaaatgtcttgtacgtgaggtgacgagtgcgtacttgtgctaattattggaaatccggttttcattaagtaatcactagtatgttcctttcctgtttttattacttgcattattatgcctgttgttagcttaggaaagcatgtctaagtgacttaattgttttatttgctcaacctaccttacttgaattatgtgcagcatactaggctagaatcatttgttgccttaatatgaaattttgtcatttctgtatattttgctgttgctgctgcatatttatttgggactacggatgtgggattccggtagctcccccttgtatgtttattttgggactacggatgtgggattctaatagttcccccttgtctttttattttgggactaccgatgtgggatgccggtatatccccctgcacaattatatggaactacaggaatgcacccggtagattccccccgtattgggtatttacatttgggactacggaacaggattccggtagatccccgcgcactatgagttggactatcctggaagatccatcggatatgtatatatggggctacaggatggtatcctggtagatccctggttgttattttggtgctaagtcgcatttctttccgtgttttgccttgtgtctgtaatagttgttgttgtccctttttatatcctgtgttacttttactgttgtatttatttatattgttctgttctacactgtcaaaatttatactttatttaacctcagtagggccctgaccttcctcgttactacccgatcgaggttaggcttggcacctactgagtaccgctgtggtgtactcatgttgcttctacgcatgtttttcatgtgcagatccaaatactgcaactcagtcctaccacctgtaaggcgaggtgactgctctagagacttcggggtacatctgccacgtccatagaccgaggagtccctttctatactagcttttaacatttgcccttctgtattttttttccttgttagatattctggagttagacattgtagatatccaaaggcttgtggttccgtgagttttcggttcttgggatagtgtacttgattctgagaatgttgtgttgtatatgccgagcggcattttaactattgttttcattcagttattttggcttttgattatttcttccgcaagtttcgtttatgttcagcatttgttaggcttagctagtcgtagaggactaggtgctgtctcgatggttcacggagggtgaaccggggtcatgacaagttgttatcagagctataggttcataggagtcatggatcacaagccggtctattaaagtttcgctgatcggtacgaaaacatctgtaattatctacgagaggctatgtaactgttaggaaaattccactttatttgatttccttgtcgtgcgatattttgacatcacaattctaaacttctgtcttttattctctcatagatggtgaggacacatgctacccgagattatcaggcacccgtgccccctattgcaaccgtcagagaccggggctggggtagaggccgaggacgcgcacgtggtgcagccagagcacttatgcgagctgccgccgaggtaccaccaacagttccagccggagtccaggcacctgacacgcctactgctacaactactccagctcttcaggagactctagcacaattcataagcatgtacaccactatggctcaggcagggttgcttccccttgctgcagctacatctcaggccgggggaggagcacagactcccgccgctcgtacccctgagcagtgagtgcatgttgagcaggtccctgagattattcttgtaccgcttgcagtgccagttcagcccgagggcagggcagcggcttccgaggaggagcaactaaggcttgagaggttcaagaggtacaagcctcttatattcaacggtctagcatcggaggatgctctaggatttctagatgagagttaccgcattctctgtaccatgggtatatccggatcgagcgaggttttcttcactatcttccagcttcaaggagccacttatgagtggtggcgcatttatgagttacacagtctggatgaggctgcttcactgacttagactcagttttcagatctgttcttgagagtgtatgttcctcagagcctcagggacgcatggcgcgcagagtttgagcatttacgccagggtactatgactatctcatattatgcagtctgttacactagtttggctagtcatgcaccagccttggtttctactgttcgcgagagggtttaccggtttattgagggctttattcccatcatcaggttagcatggctcgtgagttggagatggatatttcttatcagcaggtgcgggcattgctaggaggattgagggtatgcatgccagggagagagagagagagaggagagggaggccaagaggtctcgaaagtcgggccatttctctagtgcccgtgccccagctccaggtcgtcattgtaggggttatatgagtcgccctgttctttcagctcttccagtagccagtagtattccagctcctcctagacctcaagagccttattatgcaccatcggtatctagcacgccttctgtgcggggtgctttccggggttagtccaagacctggcccgagctagtcacagccaccacgtcctcccagagcttgttttgagtgtggtgacacacgtcatatggtgagggatttccccagacttgggaggggtgcacctccacagacttcttagccacagtgtgccccacagagttctcaggatatggttacagctccagttaccccacctgctcagccagctagaagtggaggtcggggaggtagaggtcgccctaggggggaggccaggccagatactattcccttcctaccagtaccgaggttgttgcctctgattctgtcatcacaagtattatactggtttgtcatagagatgcatcggttctattcaatctagtctctacttactcttatgtgtcttcttatttgatccgcatttgggtgtatctcgggattctttgagttctcctgtttatgtttctactcctatgggagattctcttattgtggaccacgtttatcggtcgtgtttggtttcttttagtagttttgagaccaaagcctatttattgttactcagcatggttgactttgatattttcttgggcatggactggttgtcgccccattatgctattcttgattgtcacgccaaaaccgtgatgctagctatgccaggcgtaccgcgtgttgagtggaggggtactttagatcacactcccagtagagttatttcttttcttaaagcacagcgtatggttgagaagggtgtgacgcatatttagcttatgtgagagatatcagtattgatacccctttagttgattcagttccagtagaactggattttcccgatgtgtttccagctgacctttcgggcatgctgcctgatagagatattgattttggcattgatctattgccaagcactcagaccatttctattcctccatattgtatggctccttctaagttgaaggagttgaaggatcagttacaggaatttcttgataagggttttattcggcccagtgtatcaccttggggtgctcctatcttgtttgtgaagaaaaaggatggttctatgcgtatgtgtattgattatcgccagctaaataaggttacagtgaagaactgttatcctttgcctcgtattgatgatctatttgaccagcttcagggctctaagattgatttgcgctcaggttaccatcagttgaagattcgggagccatatatcccgaagactgctttcaggactcggtatggtcattatgagttccttgttatgtcatttgggctgaccaattccccaacagcctttatgcatttgatgcacagtgtgttccggccgtatcttgacttattcatcattgtctttattgatgatattctggtatattcccggagtcgggaagatcatgagcagcacctgagggttgtgcttcagactctaagagagaagaagttatatgctaagttctagaaatgtgagttttggttggattcagttgcattcttaggccatgtggtatcgagtgagggtattcaaatggatccgaagaagatagaggccgtgcagagttgcccagaccatccttagctaccgagatcttcagtttccttggcctggcgggttactaacgttgttttgtggaggcattttcatcaattgcagccctatgaccaggttgacccagaagggtgctccgttccagtggacagaggagtgtgaggcgagctttcaaaagctcaagacagctttgactacagccccattttttatattgcctacaggttcagggtcttatacagtctattgtgatgccttgaggattggcctcagagcggtgttgatataggacggtagggtgattgcctacacgtccagacagttgaagatacatgagaagaactaccctgttcacgaccttgagttagcggccattgttcacaccctgaagatctggcgccattctttatacggtgtgccttgtgagatttatactgatcatcagagcttgcagcacttgttcgagcaaaaggatctaaattcgcaccaaatgaggtggttagagttgctgaaagactatgacatcactattttgtatcacccgggcaaggacaatgtggtggccgatgcttttagtcaccgggcagagagtttggggagtttggcttatttaccagcatcggagaggcctatggcgatggatgttcaagtcttagccagccagtttgtgagattggatctttcggatcccagtcaggttctagcttgcgtagtttctcggtcttccttatttgatcgtatcagggagcagcagtatgatgaccctcatttgcttgtcctcaaggataaggtccagaacagtgatgccagagatatgactattggtgattatagggtattgaggatgcagggtcggatttgtgtacccaatgttgatgggcttcgagagttgcttctagaggaggcccatagctcgcagtatttcattcatccgactgccacgaagatgtatcaggatttgaggcagcattactggtggagatggatgaagaaagatatagttggatttgtagctcggtgcctcaactgttagtaggtgaagtgtgatctccaaagacctggtgggttacttcagcagatagagatttcggagtggaagtgagagcggatcaccatggactttgtagttgggctcccacggactttgagaaagttcgatgctatttgggtgatttatggatcggctgatcaagtccgctcactttattcctatgtgtactacttattcctcagagcggttggcagagatctatattcgggagattgttcgtctacatggtattctagtgttcatcattttagatagaggtactcagttcacattacggttctggagggccgttcagcatgagttgggtactcgggtagagttgattacaacatttcaacctcagacggatggacagtccgagcacactattcagattcttgcggatatgctctgtgcgtgtgtgattgagtttggagggtcttgggattaattcttgccattggcggagttttcttacaacaacagctattagtccagcatttcagatagcactgtatgatgttttatatggtagacggtgtagatccccggtgggttggcttgagccaggtgaggccaaattattgggcacagacttggttcaggatgctttggagaagttcaaggtgattcaagatagactacgtacagcctagtctagacagaagagttacacggacgaaaggttcgtgatgtttcttatatggttagagagcgagttctgcttcgagtttcgcctatgaagggcattatgagatttgggaagaaaggaaagttgagtccaaggtttattggcccttttgagatattgaggcatgttggggaggttgcttatgagcttgctatacctcccagctttgcaggaattcatctggtatttcatgtttcgatactctagaggtatcacggtaatctgtcgcatgtgttgaattttagttcagtccagttggacaaggatctatcctatgttgaggagccaatggcaatattggataggaaggttagaaaggtgaggtcaaagaatattgcatccgtgaacgttcagtggcggggtcagccggtcgaggaggcgacctgggagaccaggcaggatatgcgcagccgttaccctcaccttttcactacttcaaatatgtctctatgctcgttcgaggacgaacgaatgttttagtgtagaaggatgtgacaacccggtcggtcgttttaagaatttatgccccgatgccccgatcccccatagaacagctgaaacctgcaatttttccaagtctaattctactctatggcctatccaaatctcacccgagtcctcgggactccaatccaaacatgtccaccaacctaaaaacatcatacggacttgctagtgcattcaaattactcaaataacaacaacaactatgaatttagcatcaaaatcatgaaatttcttaagaacaacaaattttccaatttcctcaaataaggtccgattcatatcatttcaagtctgtttcttaccaaattttacagactcgacttaaaccacatataagacatgtaccgggctccagaaccataacacgggcccgatagcatcaaattttaaacacatttcatttccaaaacctataaataatttcagaaaacaattttctttaaaaattcatttcttaggcttgggacctcggaattcgattccaggcatacacccaagtaaatatttttctacggaccctctggaaccgtcaaatcacgggccagggtccgttcacccaaaatgttgaccgaagtcaacttaaattcattttaaagtcaaaattcattatttttcacatattttaacatattggctttctcgccacgcgtccgaactgcgcacgcaaattgaggtgatgcagaaagatgtttttaaggccttggaatacaaaatttacttttaaaacaagtgatgatcttttgggtcatcacatagcataatagtagctacacacgaactctcgtcacctagtgcgtatgtagcccccgcatttagtggcaaattatttgataatatcacctatggggacaattccctcttacaaggttagataggagactcgcctcgctccaagcgtacttccaatatcaagaacgagctcaaactctcaatttggagccgaacgatccaaaactagataaacgaggtaggaactagtcaatacaagcttacaagatcgcattctaacgatttaagcaatttcacaaccttaaacacaagtttcctaaaatctgaccccgggtccacgtgcccggattccgaaatttttcgaagaaagttgttctttataacctaaggaccaataatatatgatttctaatgcatttcataacaaacttcatggttaaatctaacttttatcaaaatcctaggttttgctctaactccatgattttaccttaatctttgtgtgttaatctacccaagactcaagtattaagctagaaataagtagggtaaacttacctcaagatgctaggtgaaggtcctctctcaagagctccaaaatcgcccaatgggtgagtgaaaaatggccaaaatgacttagagcccgtaataaatgaagctcactacttcagtgatttctgcatctgcggtcctgctactatgagaggatcgccggatctgtggaattggccaagtgggctaggaccgctcctatggacttgaagccaattctacgcagctgcttctgcaattttgggcctggcctgccttggccgcatctgtgagagaatgaccgcttctgcggtctcgcacctgcggctgaccaatcgcaggtgcggttatgacagcaacctgaagcttcaactcttcttaaattttccaacttcactcgagcctcgtccgattgacgctcggggatcccgggccctgcccaaacataccgacaaatttgaaatcatgaaacggacccgctcgaatctccggaacgcccgtaacaacgctaaatctaagaatcaccccttaaaaccaattggatcaaacttatgaacttcaagttcttcaattcacttctaacgtgccgaaacgtacttatactactcggattgacaccaaattttgcgggcaagtcttaaatgttatattggacctatactaggctctggaaccaacatacgagcctgataccaatgtgatcaatcattatttagtttttttaaatccttagaattttagtttaataatttctaataaaaattcattactcgggctagggaccttagaatttgattccgagcatacgcccatgtcccatattttcctatggaccgtccaggaccgccaaaatacgaatctgggtccgtttactaaaaatgttgaccaaggtcaaacttagccttttaagaaaatattaaggaatcaaatgagcatattccaacccaaactcttccaagtcccgaaccaaccatccccacaagtcgtaaattagttaaagcaagtacgagaagtttcatttaggggaacggggttctaaaaagcaaaacgaccagttgggtcgttacattctccacctcttaaacaaacgttcgtcctcgaacggacatagaaaagtacctgaggtgctgaataaatgtggatatctgctctacacgtccttctcggactcccaggttgcctcctcgactgttggcccttccactggaccttcaccgctgaaatcctcttggatcttaactggctatcctgcctatcagtaatggcaactggctcctcctcataactcatactctcatctagctgaatagtactgaagtctaacacatgggacaagtcggcatgatacctccgaagcatagacaagtgaaaaactgaatgaactcccaataagctgggggtaaagcaagctcgtaagcaacctccccaactcacatcaacacctcaaatgggccaataaaccttgggctcagcttgaccttcttcccgaacctcataacacccttcattggcgatactttcaagaggaccttctcacaaaccatgaatgatacatcacgcgccttctgatccacgtaactcttctgtttggactgagctgtgcgaagcctctcctgaatcaactttaccttgtccaaggcatcttgcaccaaatctttaccgtatatttagcctcaccaggctcaaaccacccaataggagaacgacaccgccgaccatataaagcctcaaatagagccatctcgatgctggactggtggctgttgttgtaagcaaactctgccaaaggcaagaactgatcccactatcctccaaagtcaatcacacatgctctaagcatgtactccaaaatttgaactgttcgctccgattgatcgtcggtctgaggatggaatgttgtgctaagctctatatgggtccccaactcactctgaatggctctccaaaaatgggaagtgaactgagggccaatatctaatacgatggaaacaggcactccgtgcaacctgactatctcccgaatgtaaatctgaggcaatctctctgaagtgtaagtagtcataaccggaataaagtgcaccgatttggtcaacctgtcaacaatgacccatactacatcaaacttccgcaaagtctggggcaacccaactacgaagtccatagtaatgtgctcccacttccattgtggtataggcatctgctgaagtaggccacccggcctctagtgctcatacttaacctgctggcaattcaaacacttagccacatactccattgtgtccttcttcatcctccgccaccaataatgttgtctcaagtcatgatacatcttcgtctcactcggatgaatggaataccatgaactgtgtgcctcctctagtatcctctccatcagaccatcaacattaggaacacataagtgaccctggagtcgcaaaacaccatcctcaccaatagaaaactctttggcactaccctgaagcattgtctctctgagaaccgccaaatgaggatcatcgaactgtcgggccttgatctgccccaataatgaagactgaccaacaacacacgcaagaactcggttgggctctgaaatatccaacctcacaagtctattagccaaggactgaatgtccaaagctagtggcctctcctctgctggaatgaatgccaagctacccatactctctactttcctacttaaggcaaacgcgaccacattttccttgcccggatgataaagaatggtgatgtcataatccttcagtaactcaagccatctatgctgcctcaaattgagatccctctgctagaataaatgctgtaagccgcgatgatcagtataaacctcatatgacaccccatatagataatgcctctatatcttaagagcatgaacaatcgcggccaacttcaaatcgtgcacaagataattcttctcatggatctttagcttacgtgaagatatgcaataacttgcccttcctgcatcaatacacatcccaatccaacacctgaagagtcgcaatatgccgtatacatccctgaaccggaaggcaacacaagaactggtgtcgtagtcaaagctgtcttgagctcctgaaagctcgcctcataatcatcataccaacggaaaggagcaccctcctgggtcaatctagtcagaggtgatggaatagatgaaaagccatgcacaaatcatctgtaatatcctgttaaccataggaaactcctgatctcggtcactgaagtaggatgtggccaactctaaactgcctcaatatttttgggatccaccttaataccctctcctgacacaacatgcccaaagaatgccactgactctagccaaaaactcacacttggagaacttagcatatagcttttgctctcgcaaggtctggagcactactctcaaatgttactcgtgctcctccaagctacgtgagtatatcaagatgtcgtcaatgaagacgatgacaaaggaatcaatataaggtttgaacaccctgttcatcaagtccataaatgttgttggggcattagtcaagccaaaggacatcaccagaaactcataatagttatatctagtccgaaatgcagtcttcagaatatccgagtcccagatcttcaactgatggtacctgacctcaagtcgatcttagagaacacctaagcaccctgaaactgttcaaacaaatcgtcgatacgaggcaatggatatttgttcttgatagtgactttgttcaactggcggtaatcaatgcgcatccgcatagtctcatccttcatcttcacaaataacactggtgcacccaaggtgatacactaggtcaaacaaaccccttaactaacgactcctcaagcttctctttcaactccttcggaaccatacggtatggtgggatggatataggttgggtgcctggagccaaatcaatacaaaaatcaatatcacgatctggtggcatgccaggaagattagaaggaaacacatcggcaatatcccgaactactgggactaaatcaatcgttggagactctgcggtggtatcccgaacataatccaaataagccaaacaccccttctcgaccatatgacaagccttcaggaaagagataacccgactagacatatcaactgtggaacccttccactccaaccttggcaaccctagcattgataatgtaacagttttggcatggcaatctaggacggcgtgatatggagataaccaatccatgcccaggatgatcgatcatataaagcaacaggagatccgctctagtctcaaaaccacagaatgtgactacacaagaccgatagatccgattcacaaccatagaactacccacaggagtggacacatgaacgggagtgctcaaaggcgcaggaggaataactaggaaatgagcaaacagagatgatacatatgaataggtggaccctggatcaaataataccgaagcatctctaccgcagacgaaaataatacctgtgttgacagtatctgaggctaatacatctggcctagccggaagggcatagaatctggctggagcgccgactggctagcctccacctgactgagcagtagctggctgacctcactctgcctggcccccacctctaggatggcctctacccgtctgtcccccgcctctgggaggctgagcaaccggtgctgaaattataggctgctgaccctactgtactaccttgccccaaagtttggggcaggtcctcttcatgtgactcggatctccacactcgtagtaacccctcggcaccatagcctgttgccttgaagtctgagcctactgagccgaatatccactagaagaactctgaatggctggtgggcgatatgaactctctggcatggcattgaagtaagcactggaagaaccctgatgactagaatacccggtggaggaaccctgaatagctggtggacggtaaggactctccggtatcgcactaaaataaggtctcactagagaacctcggggaggtggtggtggtgctgaatacgggggtatgctgggctgacccctcccggagtgccccctacccctagctggggaacctctaaactctctagaaaatcggtccctcttctcctactgaaactgctctctacccctctggcgataaccctcaatcctacgagcaatctctaccactagctgatactcagtacccatctccacctctcgggccatgctagctcgaataccgaggtgcaaccccgcaacaaacctccgcactctctctgaatctgtgggaagtatcatgagagcatggcgagacaactcagaatatctcgcctcatagtcggtcacggacatctgactctgttcaagatgctcaaactgataccgcagctcttccctctcaaagggtgaaatatccctatccaaaaataactgtgtgaactgaccctaagtgaggggaggagaacctgctggcctgccaagaacataagactgccaccatctgcgggccctgccctccagctgaaaagtagtgaagtctaccccatacgactccaatatcctcatgttgtgcagtttgtccctacacctatcaatgaaatcctaggaaacctcatgacgctcacccccgaagacaggatggtgaagtctagtccatctatccaataacttctgcgggtcaccatccgcagctagtctgggctcgggcactactacagcaactggctgagcctcatccgcaggtagtgcacccgaagtctgatacattgcagctgtgtggctaggagcctgagtagtagggcatgttctccccctcctgcctatgatataggtggatctactggaaataaactagcctgagtcatggtgtccatgaacagcagcatacggccaatgatctcttggaaacccggtgctatcataaagtccaccggggtaggctctgctgcgggcacctcgccctgctcctcaatgataggatctcctgtaggatctgctagtggtgctaccgagacagctttggtacgccctcgtcccctaccttgagccggtgctctcccccggcctctgccttgacctctagcaacggagggagcagctcctcccgggtctaaaaaattagtcgtacgtgtcctcaccatctgtgagagaatagaagagggaaatttagtataccaaccactgcacgataggaaataggtaaagagtagttttcctaacaccctatagactctcgaagatgaatacatacgtctttgtaccgatccgcaagactctattaggttttcccatgacttgtgagacctacatgaacctagtgctctgataccatgttgtcacgacccaattctactatagttcatgatggctcccaacacccttgtcaggcaagccaacgcggaagtgttaacaagtcctcattttctctttactaaaacaagtacagaagttttctaaatttgcagttaaaaagcatgtgataattaacaatgtacaataatagttatacaattcccaaaagaatagtctactaatgtgtgtgccaaaacctggtgtcacaagtttacgggcaactagtagaatatacaaaagaataaatctatcctactgtctgaaatagaatagacaaccaaaataaagggagactccatcatgctgctgaatggcacaggaagggagcagctcactatgaaaatctcggacacggatcaagaatgcgcaccggactggtaaccagatgtacctacctcagatcctgtacaattaagtacaaaagtgtagtatgagtacataaacaatatgaacccagtaagtatcctgtctaatatcgaagaagtagagacgagaggtcgacttgacacttactaaggtcaaataatatgagaaatgaattatactgagcatggatataataaataattagcagtttatagcaagaaataacaggtcctctcctagataatatcaaagttgtccactttcattccagggcaaataataaagctcaattcatagaaaaatactgagtaaagcatgcgcaagtagtgtcgaggacgtacggcccgatccaacgtaaaagtaaattgtgcactgccgagggtcgaatggcgcaaaccatagatgtatctattaccccgctcgcgaatcaaacatgcgacgcggtcaaatgtaattaaaaacaacaacaagcagataggaatatataaccgaggagcaattactcatagaaatatcaacttctctttaaaaaggccaagaaagataatgttcctcttactagtctcatttaccataatcaccatgatttaaacaatccaaattaaacataaagtttcaagaataacacataaagcatatttttgggtcctagattactcagacttagcataatagtagctacacacggactttcgtcacctagtgcgtacgtagcccccgcatttaatggcaaattatttgattatatcacctacggggacaattccctcttacaaggttagataggagactcaactcgctccaagcgtacttccaatatcaagaacgagctcaaaccctcaatttggagccgaacgatccaaaactagataaatgaggtaggaactagtcaatacaagctcaaaagattgcattctaactatttaagcaattttccaaccttaaacacaagtttcctaaaattcaaccccgggcccacgttcccggatttcaaaatttttcgaagaaagttgttctttataacctaacgattaataatatatgatttcaaacgcatttcataacaaaattcgttgttaaatctaatttttatcaaaaccctaggttttgctctaaccccataattttaccttaatctttgtgtgttaatctacctaagactcaagtattaaactagaaataagtagtgtaaacttacctgaagatgctaggtgaaggtcctctctcaagagctcaaaaatagcccaatgggtgagtaaaaatggccaaaatgacttagagcccgtaataaatgaagctcactgcttcagtgattttcacatctgcggtcccgcttctgcgagaggaaggccgcatctacggaattggccaagtgggctgggaccgctcctgcggtcttgaagccgcttctgcgattttgggcctggcctgccttggtcgcatttgcgagagaacgaccgcttctgcggtctcgcacctgcggctaaccaaccgcaggtacggttatgacagcaacatgaagctttagctcttctcaaattttccaacttcactcgagcctcgtccgattgacgctcggggctcccgggccctgcccgaacataccgacaagtttgaaatcatgaaacagacccgcgtgaacctccttaacacccgaaaaaacactaaatctaagaatcaccccttaaaaccaattggatcaaacttatgaacttcaagttcttcaattcacttctaacgtgccgaaacgtacttatactattcggattgacaccaaattttgcaggcaagtcttaaatgtattggacttgtactgggctctggaaccaatatacgatcccgataccaatgtgatcaatcattatttagtttctttaaatccttagaatttcagtttaacaatttctaataaaaattcattactcaggctagggacatcgaaattcgattccgggcatacgcccaggtcccatattttcctccggaccctccggggccgccaaaacacgtattcgggttcgtttgctaaaaatgttgatcaaggtcaaacttagccttttaagaaaatcttaaggaatcaaatgagcctattccaacccaaactcttctaaatcacgaaccaaccattcccacaggtcgtaaattagttaaagcaagcgcaagaagtttcatttaggggaacgtgattttaaaaagcaaaacaactagtcgggtcgttataattacatgatcattggcatgacacattggtatctttttgaactcccgtaagttttactattctatcatctgtgtatgagttttaaaaatacgtaagttggttaaagttgcatttaactaggggcgtcactgctctatcgaaaacaaggggtgtcactgttgtttcgagaagatgctgactttttggtttatatattgcatataactaatattagatttttcctgaaccatcccaattttcttggttttatggcattatctgttagattcagttaacttgaagtacttaagttttaaaaaagacgcataagaatatttactaagatgcctcattgtcatgtaaaataaaaaaaaattaacttaacaagaaaaattataaaactctcactacattttgcattgccgattaaaaaaaagtcttctctattaaaccaagaaaactagtactaagtgattacttattaaaaaataaaaaagaactagtaagtgatattgctcaaaagtttgaaatgattctattcttataagtattaaggttgcctatatttctaattcccaatatgtcctactaccatattatttatatatgagtctcacataaaggtgtctaacgggccggatcagcccgattccggaccgtctcagaccggtgaaaaccggaaccggcccggaccggtagaagggggccgggtgaggctgggttataggagtaaggcagtttgtaccgttcacttttgaaccaccggttaaccggaccggtcaaacccggtcaatgaacaatactgttcatctggttaaccggcccggcccagaccgacccagaccgatttaacggtaacaatttcttttttaagcttgggcctcagattctgaccgttggcaatggtccatttcacaatatggtcgttgcccaatggctaaaattgacatttagcccaatttttgggtttttttaaaaaaaaattaaccccctttgaaaaactataaatacaccccatcttcctcatttctttactcatctctcaattctcaatctcaagttaaatcatgcctcgtacttctagagtgcgctcatatgttttgaaacactttgaggtggtagaagaaaatgaagaagttcagaaagtaaagtgcaagaattgtggtcaagtcttaaatcttcgttcaaaatctggcacagacagtttaaggaggcatataaagaattgtcttgagcgtcctccgaaaattcgtatttaagttgatttgagacaatttgtgttattttaaaattattagacgtatttatgcttaatgttttagtttgttagattaatttgatgtattattatgcatgaaaatttagttttactattttttttgttaatttacttgttaaatgcaaacttcaattttgtaattttgaaataaatgtagcacttgcaatttataagtgcaattttttcccatcttcattatattctttatatttttactttatattaatatagcttacaataattatacaaaaattcaaaatacaaaaaaaaagtaaaaataacaataacccggtccggcccggccccatgaacctgtaacccttacggttcaatttttacctggatgaaccccaacccattaaatccggtatgccccaacccataaccgatctgaaccataacccgtacgggtactaaattcccctacccagcccggcccggcccacccattaaacacctatagtctcataacattacaagagatcgtattgacttacttcactatgcatgtgcatttacccatgactcatatgacgttatatatgcaccaccacctgatcagctggtatacgttgatgattctgcccacaatggcactagatggcgttatatacgtatatatatatcatatcatcttggccactgtgggcaaatcatcaacgtataccaactgatatatatatataggatatgggaaaaggttatgacgttatatacgcaccaccacctgatcagctggtatacgttgatgatttgcccatagtgaccgagatgatatgatgggatgccctcagaggcttgatgattttatgtacgtacagacctatgcattatatgacatttatatgcatgccattataaatattttatgatttacaaagctatccagacttacaagtatagataatcggtttggcgagccctcatagtagacgagattggcattcagcgaaggattggtaagacttcacctcattcagagtgcaggcgagtctataagtcatcgtgtcagagtttttgtacagacttatgggtaggtcggtaccctgtcccattttatgtcaaataatcttagaggctttgtagacagaggttcagttggtacagtatgtcagaggccttgacgggcccatatgtattcatgttttaataaatatgattcagtgatacagtgttgcccacttatagttatgcattacgagttgtagctatgttggcccatgatagttataaaaggaatgaaaaagttacagagtgattcgctcgggccaatgcgacaccaggtgccagccacgcctcccaaggttggggcgtgacaatttctttcattaattaaattttgttgttccttcatataaataaatgtttaaaccatcacatataattattaacgtgcaacgcagttcatagatactagtaataaataaatgtagatagtcgtttatgtttttttttgttgctcaacctcgatatatttgatatattcattttttctgcttgggactaattcatcgatatggagtatcatataaaacacaaaacttcaagactaatgtggaatcaaaagagctcacatgcactaagcgaaataataatataattatagacttgcatggtcgatattgtcaaccagcttaattaagacagagatgcaattattgcttttattttatggtgatttttggaactccaagaatcaaaagaagacttattaaagaatgacagtctctcttttgtgctaaaattttacattgtttgcaacaacaaaaaaaaaaggaaaaaaagaagatggctgatgtagcagtgaattttctggtagagaatttgatgcagttgttgagggacaatacagagctaatatttggagtgaaaggtgaggcagagaatctgcttcaagatttgagtgagttcaatgcgtttctgaagcaagcagacaagtcccgcagcgataacgaagttctaaaagaattggtgaagagtatcagaaaagtgacgaatgattctgaagacgctattgataagtttgtaattgaggcaaagcttcacaaggacaaaggggtaggcaggtttgtggacattgcgcattataaaagagtgaaagatgtagcccttgagattaaaggtatcagagatagggtgaaagaaatccgtctgaacaatgcacatggccttcaagctcttcaagatgatgatccatccaacagaggcgtggaagacagaaaggtacctatattatatatgccttcaatcattcattttttgcccttaatttgcgccgaacccgctcggaacactttagctccgcccctgcctgccatgtttgttgttggtatcatgtaaaattttagcatgtaactcaacaccacaagtcaatgagacaacgaatgcagtaacccagctagggctatgcatcagtcgggtcggatcggatcagatcgaatttaacacatttcgaattgtaaattcggattccgatttttataaaatgcaatccgaatccaatccaaattaaattggatcggattggattttaaagtttgaatcgggtaaatatttcggattttcgaatcagatagtatgccttattaaggctactaacaatctaatcggctactacactttataaggcttaaattgaaaggcaacaaatgtcttttatagcaatagacaaaacaaagctccatagcaaaataaaataaactaaaattccaaacaaatgttatctcggctgggaatcaagccccaactcagagctgtgggccaggttgctttgctttatcggatcaatcagtatgcggtgggcaagctctttcccaagtcgctgagctgtttaacagagggaaggaaaaagaaatgacaaaacaaaaactacaaaggaaaaagaatcgaatctcgctcattttcaggtaagatttacttagctcgctccttgctcgcgaagcggcataccaataaaaagaaaagcgttatcggatttccatcgtcgttgtccgtcgataggaaggagatactgagaatgagagacacaaagataagacttaagagaagcgaactaacaagtgaggcttgctcagttgataaaagcacctctacccacgaccgttaggtcctgggttcgagtcatgctggaggagaagggtggaaacactatagatcctcctaaattgggagggatattaaaaaaaaaaaaaaaaaaaagagaagcgaatagagcaatttgaagagaagttagagagagacttcgatataaactaagaaaaaataagtctaaagagagtggatgggttcggattctcggatatccgatccaaatgcacagccctaaacccagcattgcatttatatatatatatatatatatatatatatatatatatatatttaacaggtttagactccttaataagaatgaaggtgagtaagattagatgacaatatgctgcttaaatataaccaattcagatgtctccattgagcctccagcagaatataatggtacaatcaacggaactgtattgcacttaaatatactttgcacaggaagatactcctgcgcaaagttcatagaatgattatcaattttatatgagaagccgacataatcaacaaaatgagtatcgtaaaaatgtgaaagtaagaaggatgtgtggcatttcttggacaatatctatattgttgtaatgttagtgttctatatatgtcttgggaaaatccacctttgcttctatttactactgagtatcaatttttccaatacaaaacaaagctaatcacctatcttttaattaagctgcacaaatgcgtacgtaatacaatatgttttggttgaatataatgtttcttttcttgccaatgaacgttaacttcatatatatgtctaatcttcatctttgatattaatttaaaagcctcccgtggttgaggaagatgatgtggtgggctttgatgaggaggcacagaaggtaatcgaccgtcttcttgacagatcagatgaattagaggttattccagttgtaggaatgcctggtcttggcaaaaccacactagcaactaagattttcaagcatcggaaggttgaatacgagttctttactcgagtttgggtttatgtctcgcaatcatacaagacaagagaattatatctcaacatcattagcaaattcaccggaaaaacaaaacaataccaatatatgtgtgggaacgtatcaagattgctttcccgaacaacaaaaagtgcaatagagtattgttgaccactcgagatcacaaggtggctcatcattgcaacaatactccacatgatttaaaatttcttagcgatgaggaaagttggatgttgctagagaagaaagtttttcacaaggctaaatgtcctccggaattggaaagacctggacagagcatagccaggaagtgtaagggacttccccttgcaattgtggtgattgcaggagctctaatagggaaacgcaagacaacaagggagtgggagcaagtggatcagagtgttggtgaacacctcattaatagaaaccagccaaagaattgtaataaaattggtgcaaatgagttatgatcgtttgccttacgacttgaaagcatgctttttgtattgtggtgcatttcccagaggctttgagatccctgcttggaatttgatccgtttatggatcgccgaaggcttcatccaatacaaagggcccttatcccttgaacgtaaagcagaggattacttgaatgatctcgtcaacagaaacttagtgatgataattcaaaggacgtctgatggacaaatcaaaacatgtcgtgttcatgacatgttgcatgagttttgctggcaagaggccacaacagaagaaaatcttttccaagaggtaaaattaggtgttgggcaatttgctcgtgagatacagcaactatccacctaccgccgcttgtgcattcattcctcagttctggaattcatttctatgaagccctctggtgagcatgttaggtcattcctatgtttttcttcagaaaaaattgacatgcccccggttgacatcccaaacataccaaaagactttccattgctaagggtgttggatgctgaatccatcaaattcagttgcttttgcagggagtttttccaattgtattttctgaggtatattgctttctcatctgactttatcaagatccttcctaaacatattggggaactatggaacgtacaaaccctcattgttaacacacaacagagcaatcttgatattcaagcagacatatggaacatgccacggctgaggcatctgcacactaacacgtccgctaaattgcctacgcctgttgccccaaaaagtagcaaggttacctcggtaaatcaatgcctacaaactctctccacaattgcaccagaaagctgcacagaagaagttttttcaagggctccaaacttgaaaaaactgggcattcgtggtaaaatctttatgcttctggaaccaaataagtccgaattgttcaacaatgttaagaagctacaatgtcttgagaacttgaagctgataaatgttggtcaaagtgggaaacaattacgccttcctccaacatatatatttccgacaaatttgaggaagctaacattattagatacctggttggagtgggatgatatgtctgtattgggccagttagagtaccttgaagtcttgaagctgaaagacaatgcatttaagggagaatactgggaaccaaaagttggaggttttcgttccctactagtgttatggatcgaaaggtcagatttagcttcttggaatgcttcaagtgatcactttccaagacttaagcgtcttgttctcgtatcatgtgataaacttgaggaggtccccattggcttggctgatatacgcggcctccaagttatggagttgcgaaattcaaccaagcaaacagcaaaatctgcccgggatatacaggccaaaaaagacaagcaaactcaagaaggggctaaaacccaaaggttcaagctttctatattccctccttatctctgatcaacgcggcgtacagcttctttgaaaggttagttaaatcttccctcactactgtttgatttgtgtttcataatccaaaggaaatgtttaacttgggtgcaattctctgctatctccccttttccaaggaggggtataacttgctaaaatactcgccagtaacatgcagataagaatatttagtaactatgaatttaaacaattcaatcagccagtttctttatctcaaaatcctgtccgttatcatttaacaaacattgaccagaaatatagatgctacaaagttatctccttgcattttgtgctggaaacctaacttctgcaatccttttctgttttcttttttatttcaatggttctctgacttccatatactaataggagtgacagatcacaattttgaacatcatttggaatagtaatcgactaatcgtcagtgtcaaatagttggatgcagtttaattacactctaagtcatgtggcaataatcttatgcatattttctctattggctactcgttttcccttgggatttttggttgcatttagtgattaaccttatgctttgataaaaattcagtaggtaacattctccttggtagggttttattttttttccattctggcctacaatagcaatataggtttttattaaaggaaaaaactaaccagtgagcgttgctattggtacaggtctgaaataattgcatgatgttggctgctggctttttcttccttcagctttatttggctcactgctctcacagtgaagcctattgcattgtcataagtggaacgactgaaccacagttttatgattcttgggtttctttctgtatttcatttgtttgatgtgttttctgttttattttggggttgaaactgtatgttgttcttttcattgtggtgttaacccataaggatagtgtactttaaactacaataagagttgattgattgttggagtcgttggcttcaaagcacaaaatatggatgtacctcaactgcttcatattccagatatatatagtcaggtaaagttataattaactgcatcacactttaatttatcatgcttaaaaataaaggtttgcagattaattacacaaatatgcaagtgattcagtgagataattgcttctacgaatctaaaggtatctcaagaaagctgaatctgatgttaagcgatggcggtacttgaaaataggcctaggaatggaaaccaatactcttaattctgcagtttttccagctgctccaagaggttgcttgaaaatgtacaaggagccggaggacaaagaagaagtattcaaaaatcacaaaaaatccatctgtttatatatattattctttaaagttacaatagatgatatgacatctcttagactagaaaataatatatttgtttttttctcattgcagcccaaaatttctaaataaatgactaataatattactctctctctcatctgtttagttaatttaaacagatgagaatgtgagaggtttttatacactctttttctctatccaaaagtctctaattacaattactaatgacaattaggagtaattactatttataacggagtaggtcaaaccgaaaaaaaaaagttacaaggtggtagtcatttttatttttgttttcatgctttgcgtaaaactgaaaagacagagagaacttatactgttatgttgccgttgaccactctgtcctcggaggtacagatcattaggagctcgattaatattcctaatcacattcaaaaacttttcttttccagcttcactcacgctcaaatcgcgcaacagatcatgcataccgcatcttttgactgaccattgagcttcctccttgtgaccattactaaatttcgacaagccagatcttccaaacaatcctctgctacttcttccaggcttcttaacttattactctttagaatcccctctgcaacccacaattggatcaatctcatgatcctcggggaatgttcctaaatggaggaaacaaggtttcaagtgaataggcaggtgatagtaactcatagcaagtaccgcaaccatatggaactgggtaagtgttctatatcccaaagtaattatacttcatgattctatggttatattcatcatttatttcggatttaaatggacgaaatcaagatttttgcaaaacttttcaagaacgaaaatttaagatttggaggtccacaatacttgaacaaaatggtgtggtggaatgtaaaaataaaaatgttgttgaaattgcattagctcttcttgatacatcaaatgttccaaaaatattaggcaatcatcttccgtcattaaacaaaattgcccctattttaatttattcctttttaaaaattgcccgaactactctcatcttaaagtatttggttgtatatattttgttcttcttcaagatcatgaacgtcataaattatcctctaaagctggtaagtgtatttttgtggggtacaatgacattcaaaaaggatatttgtgttatgatccaatacgccattcattgagaatttctcgacacgttatcttctttgaaaattcttttacttatgctagtaaagactcacaatcttctactaagtcctttttgcaaaaaaaattcactcatgattttgttggccataacaacctagccactggtccattgtagaacttgctcgctactacaactggtactactgatgactctgatccttttttgataatgattctaccttggtaaacgctaatcctttacctcaataacatgagacacatattattccgttaaatcttaataaccaaccttctcctcctcgtcaaaatgccattagacacttacttcgtcacgttctccctccagatcgatatgaatactcaccaggtgaatatggcagaccatacgccttgctaactatattaaattctatggttgtgccaagttcttatatgcaggcaagtggtcagaaatgctgggaggatgcaatgcatgaagaattggttgtccttgagaaaaatgatacacggggatatggtggagagaccgaaaaatgcaataattattgtaagtagatgggtgtactcaatcaagatgaaagctgatggatccctatatcgatacaaggcaagattggtggctcaagggtacaaatagaaatatggaattggctatgataaaatatttgctccggtagctaagatgacgacaatatgtatattgcttgctttcgcgtcaataaaaagttgaaagttacatcaactggacgtcaagaatgttttcatgcacggagacttgcaagaagtggtctatatgaatccactaccaggttataaacattctagcgcaaattaggtgtgtcgtcttaaaaaaatctttgtatggattaaagcagactcctcgctcttggtttgaaaaatttcggacaaaaatcctaggtgctggttttactcagagcatctcagattattcattattcctacgtcggtccagctcagatattactattctccttatttacatagatgatgtgattatcacagaaaatgatgaagttggaatctctcatctgaaaaaactattagactccttgttcaagatgaaggacctaggaaagctaaagttaactattagaagtcatacgattgagtccgcaaaagtatgcagaagatcttcagttaactaatctcacagatgataagaaggttcatactccaatggaagtgaatacgaaatacaaaaaagaggaaggagaacattttggagatcaaactttgtatagacgtttggttgggtcacttatatatcttaccatgagtcgtcatgatatctcttatgcagtacacgtgttaagttaattcatcactaagacttttaagatccactactcagctttgctcagggttattagatacataaggggtattgtgaatcgaagtctcttatttccatcatattcatcgctggacatggtgggatatgctgatgcagattgggctggatgccctgattcaagatgatctactacatgctggtacatgatgcttgtctcgtgcatgatctcatggaagtgtaagaaacaatcctgaacatcgaagtcatccacagaggcagaatatagaagtatgtttgttgcatgctttgaaatcatttggctacgaaggctattatcagaacttgacatcaagatcgaaggatcaaccatattgtatgtagacaataccaatgcaattcgaatagcaaccaacctcgttcatcatgaaaatacaaagcacatagacgtagacggcaactacatcagagaactggttgaagatcggagcattaacctaaggtatatatcatctaattaaagatcaactagcagatttgttcacaaaggctatgccaagaagtcgacacaattatcttctatccaaactcatgctttgtgatacatagcattagtttgcgggagggtgttgactataccttatttaagagcccaatctcagggatctcccattatgcctaacagtcaaattgtagagcaaattagctgcccaatttcagggatatttgtctagcaattagtaggctagtaatcaggagataattgagactcctttgcttgtataaatagcttttaaatcctacaattctgaacattgaaatatattagtattctttcattttctgtatctctctctttttcaataaaggcttcaacgacctattttaaattgaaagtgaatttcttctcatccttttttcttcttttagactagtaatttcccttaaaacggaagaaagtttgtagttcccaatctaaatgatatttaaaaattgggtttccaatgtgaaagatataaaagagagttccaaatatttcatttctcccaaattctgtaatgaccagaagatcacattaccaccaaatatatgtgatgatgacagacgagtaaaaaaacaacttcgacatagttgtgaatgagaataagagggggttacgttgtcaatactttaaattcggaagaaattcaaaaatagctagatttacaagtggtcatttaaaaatagtcacagtttcaaaagtaattaaaatttagccatttttcatgtaaagataaatctaaatgaaaacattgttcaaaatccggaaaaatactgcagcataatatactggagttccagtatattatactggtccagcataatatactggagtttggagcaccggtgctccagtctccagtatattatactggagccaacaaagtataccggtccagcataatatgctagaagttcatatacaggtgcaccgaactccagtatattatgctgaatcgatctctgttgcagcaaaatagtggctattttttaatgacttgacaaacgctgactatttttgaatgaccagtccgaaaactggctagaccttactattttaactgaatacttttcaaaatcattgttaagaaataatttgaatatttttagtaaaactaataaatgttagaaaagggtaaaaagttaccatattattataggaaatattttaattttaccattcattatactttgggactattcatacggttattttagaaaatcgtctcatttttacccttgacctagtggagttcaaacctaaagcataatggtatatatttttaaaatcataatcaaaagtaaaatgtataaagaccctctttttaacaatgttttgatatgtggaatatacccgtcaatattggggctctattaaaatcaaaagctgatacgaaatgaactgataaatctacctcaatttaaaattcatttaatgtataaataaataatcttagaaatttgttagaatataaaatttacctcaatttttaataattattttttgtattacctgtattaagtttatctttacaaagtttttactttcttatattctcaattgtgtaaatagattttgagtatttattgttattaattaaataactgatatgtgcaattttttaattttaaagttcttattctgctcatttatttcattatcaaacgtcattattccatatgcttaattattacttctcactttttttgttctaaaataatatctatttttcaataggtaaaaagtatatcatgttattaaagaagaaaaaaaattaataatttagagggtaaaatggggaatcaattgagatatgagcagaaaaatgcctattgatcaaagctagagacgtctaataatacgtaagtcagcaatcctaaaatacggtttataattttgcatcttaaaatcgatttataaatcgcatttgacacagctccctaatctccctgctcttttggctgatcaacctttcatctttctcgttgaatgattgtgcctttttttctaaatttgtttgttcttcaaaagagtacattagcaaatgattattgccgactttaatttgttccaaatgagtaactgactattaattttgtatgcaaaagcaggtgacttggataccgcacacattattatatttgacaagttgcaattcaaatgcctgatataatagaatgctatgattgtaggatacgatgcacaagggtattggagaaaataggcctgagtaccatagattgaacagagagttgtacatccagatcagtatacatttgcatagatcagtctttagatagcagtcctggagcagggtaaagaaagcacgtgctctattgattaatagccaaagtaatggaaatattataatagtatccttatggacggacatgcatgtatttcaagagtagatgatggctatctcgtgtttagtaagtccttggaaaggaatagggtgacagatgaaataatatttcgaggccccaaaaagtgttaatagtgaaatacataataatatttcgcttagataatatgaagttggtaggaaattaaaataaaacatctttataagaaagaaagaaatactagttaaactttctattagtggataaagttttttacgacaagatccaatgtagtatatttacaaacacattattaaggaaaaggcataagtatcctccttgaaccaaggccggatttttaattacacgtcttatctttgcggggtcttattatatatatatccctgaactattaaagcatcatgctttcatacaggatctgggaaggggtcgcaccccaactagatgtgatcgatataggtaatctattctgatataagcatcagtgacaaataattatgtattatatatacgaaaataataaaatgcatacatatgataaggcatactcattttgaaaatgagaggacaaaacttctaaaaatcactccatgagcttagatttatataagaaggtttttgtcacgatccggatttctcatcctcgggagtcgtgatggtgcctactaatatgagatagacaagctagtcctttaaactaattacttcactatccatttatttctttttacaaacataaagcgataacagaaaaacagcaaaaatttaaattaagcggaagaaaacaataaaatatctgaaatttgtatccattacactgcttaagccttaatcacccaaaacatggtgtcatagtaccacagacggtctaaaatttactatatacaaagtctgaataacatgagcgatacactgtttctgaagcaaaagatgaaacaggaaaataaagataaaggggacgccagggcctgcggacgcttgcaggtctaccttggatctccgcgtggactgaaggtagcctctaactacggtccaagagatgcttcgggatctgcacatagtgcagagtgtagtatcagcacaatcgaccccatgtgctggtaagtgtctagcctaacttcggcgaagtagtgactaggctaggaccagactaccaaataaacctgtgcaattcaaatacatatacatcgaaaaagaaatacagaaataaccagtcaagtatgggagagggagcatgctatggggaagatgttaattccgaacagaaagacaactgtaaatggaagaagcaataaatctcagatatcaataaaaaaaaaagcaataaatgcacggcatcacccttcatgcttttactcttatcctcaccaaagcagccatataatgaaaacatgcacggctgtcacacctcctttttgcgcgccctgccccgaggggttaggtgcgcgggtggagttttttccaatttaagtgacaatattcgaaatgggattattcatttaattcagagtcgccacttgggaaaggtttggcttttggtgtcctaagtcaccggtttatcttgaatcccaaatcgaggaaattttcgacttttccaaatgaagtctacgaaccagaaattctaagtaaggaattctgttgacccgagggaaggtgttaggcaccctcgaatcccgtggttctagcacggtcgcttaaattgttataatggctaaatatctgatttaaatacatatcatgacttaacgcctttattaagtttaaaccgcttttgttattatcatttattttatagaattgcaacgtcgtgaaaatgcatctcgaaccacgtcacaatcaatgcacccgcagttgttaacacatttcgactccattgagatttgaatttgggtcgcataaatgcgcacccgaatttaagaatgtaatctaattaagccgcgcctaaagggtctaacgcgttatgatttctgagaaggccatgagattcactaaacggcctagcccgaattctaaatattatgattagttgaaggccccgcaattcgcatttttttttctttttacttggcgaggctcgtctcattaaaataaaacctacaatgactacatttcttattgttttcatttccagaaatggaagaaggaaagatgcatgttaattgaaataaaaaaaacggattactatcaattcctaatcacttataaaaatgaaaggacgccataccttacgaaatattttggttgaacaaggaagctatatggaggtggatgaaatgcaatacttaattcggacatttcctcgaatcgagcttaactagacttatttaagctaggttaaggaaatcgaatgctaggcattgttactaatggtgattcgaacatgtacctatatgttgcctaacggtcttgataaatggaaggaagataacacagaacattattgtgtaggtggaaatattctatcttatgcatgtcattatctgatgggaaaccagtcgaaaattctgtgccaattatccacaccttctatatattatactattacatcttgtacttagcaaacaactagaaactaagatgcaaaaaagcaaacttgattgagtattgtctaactaatctttcactactggattacactaatcaatttatacgacagagatcagtgtatcacaaacagcacaaaacagacatctgaatcttcttcaagaactcctttcatttcatgcttttgaactgttacagttaacaccaaagtgggatttgaaatgtgtacctggaacaacactgaatactgaaatgcaaagaagaagtgaagcagaaaatcagcaacagcaggaaaccaaatagcagcagcaacagcaggtaaccagatagaaagcagaatcccagtacaagatgcagctggagccaatgaaagatgacagggtgtggcaagttcccagtaatatgaatcaaaatttaggcaaaaatagatctggggatgcactgatgctacacacaactaaaaatctcaaacagaacttaggagaaaagatatggaacagggaaatccggccagatgagagttaagacaaagggggaaagatgcagttcctctttcctgtgttatcctccctatatctattcctgtctgtgtgtatttatctgtatgtatttccactctctcttccaaaactcctcccagtgtctgtattttttaacagccctcaaggtccagtctgtatatgcctatctcctccagatggtatctccctttcaaaactcctcacagtatctgtatttttctttctcttcctctaattctgtctatttctatctcctaattctgtccctctctatatccctgtgtgtgtgtcctcccagaacttctattccccccttttataagcctcaaaactcaaacctttatcagcctgtttggattaatcaaataccccctcccatgtgctccctttttcagttccactttagctatttaagtattaatcccatgacattcccttggcaggctttaacttttcattttattatctaaaagcaagtatgggcattaaaatatatctgacagcatatactgtcagattgtttaaacttaaaagcttcttaatgcagaaaaacaggctgtgcacaaggcacatgaggtgcaccaatgcacatgctgtgcaccagtgcacatgccttccaattcaggatttaaacataaacaatcccttttttacattgactgatccaaatcaaacagctataagtaaacaaaactggttctgaattgatttcaacaaatgttcaacagaagcaaatcgatttactatgctcagacagttgaaattaattgacgacacatgtcgactcgactatattagtatgaacatacacaatcgtagccaaaaatcagacatttaaacaatattgatacatggttcgtattatactgactaagcaggaatacactcgaggagtcaaactagtcagtccaaactcgaaaatcagctacttgcacaaacaaatacataatgccttatcagaataggaggggggaatttagacaaacaaacagaggttcaggcgaagtagttgaagcacagttgatagaggtcaaagacataaacagaaaacgaacagacccttacaacaaacaaacaaaccaaaaacaactaagaaaagaaagaaaactcaccttaaaccgcaaaaagatcaaaaccttaactcagacttggtcaagcctttcttaaggctgaacggactttaaacgaagtgtttctcagacgagaaacacttggattaaagtccattagaccttaacctctttggttcgaacggatatggaccagtgacgaagaacccacaaattccaaaactcagatctgggattcatgcttccctgatcagattcggaccaaaccaagtatggtttggtcacgaggggggtctggggagtatctggtacaaaactgggattggttgggtcagatcgagttttgactcgaatcttcgaatgaagattcgaggacctggggggtgattcgaaacatggggttggtagatttgggttcaggatggcctgggggtcctatggtgttcaagggaaggtcaccggcgtccatgccgccggctttcatggcggaagtatgcagaggcggctagggtttagggctgttcgtttggggagacgaagcagctggggtattggatagggggggtagggtagtgttatgtacttatatagttagtgggcaagtggatcctggccgttggatgagacgagatgaagggccaggatccttcggctaacagggaacgacgtcgttccaagggtgaagggttagggtcggtccgggtgagacgggtcgggtttattggtgggttatggggattgatcttggaccgttggatcggcttggtttaaacggttgtgatgggttggcattgaaacgacgtagctttggtgttaaactacgtcgtttcatggcctgggggtgggctgtttggactggtggcttgggctgtccgcttgggctgagttcgttgggccaattttaacaaattggcccaagtccggaagggccttttctttctctttttttttttttattttttttttatttttatttcttttcttatttattttaaaacaaaactaagccaaagaatcaaattaaaattaaatacacattcaaatacaattatttgcacacatactaaaacatttcaaaatcggtaaagtcaaaccaaacaaaatcacggacgaaaaatgcctattcacgatcttctatttaacgaccgaattacggtttgaattacgcaggacacatatatattttttgaattttattttaataaagtaaataaataagaatgggccaaaagcacaaataaatccacaaggtgccgcacaaaaatccgaaattgtaccgcggggccaattatatattttttatttctttttggagcgattgtcgtgtgaagcaaaaatcacgtgctcacagctgcccctctttgttcggaaacacgaagggttttcgtgcaaagatcaagtgagcgtgtatgagcgattttgcctatagaccactccgtatgaagcattttttgaaagatctgaccgaatcttgcttcaaagatttcctacatatcctgggctaaacaggaatcaggtcaatgtagttcgagaagttttggtagctggggctaccatgggactgcaatgcttgccgctactgctgctgctgttgtcactgctacgtcactggctgccttattacaaccaagcgaaaattggaaactgaactaactacttttatgtatgtcaactgctagttacaagattcctatctatgattcttttacgacttgatcttgggtcttagctgattctgcttgtagactctgatctgaatcttgatgcttgcgagttgcggcgacttgttttttaatccccaggataccgaataaaatgtgaccggcagaggtcaggactttagtcaaatgttggggtcgatctgctttccctttactctaatatctcgggatatctctttttgtctttttcttctttgattccgaactgggatttatctcgtgggtcatttcgatccatgtggctcgaggtcggacctgcgggaggaaagaaacaaacaaacgaaattttctgccccagtttcactaggaaaatttcgttacttattcaccaggaagttcataaagttgatgaaagaggatatgcgtgctcagttcagggttggagccctaatatcgactagctggggaaaagttcagtgtagggttttaaaacccttatgccaaacaaaggaagaattcagtttagggtttaaaaccctaatgccgcctaaaaggaaaaaagttcagtttagggttaaaaaccctaatgctgactaaaaggaaaattcagtttagggtttaaaaccctaatgctgattgcattggaaaagctcagtttagagtttaaaactctaatgctggctaaaaggaaaaaagttcagtttagggtttaaaaaccctgatgctgactaaaagagaattcagtttagggtttaaaaccctaatgctgattgcatggaaaagctcagtttagagtttaaaactctaatgctggctaaaaggaaaaagttcagtttagggtttaaaaccctaatgctgactaaaaggaaaattcagtttagggtttaaaaccctaatgctgattgcattggaaaagctcagtttagagtttaaaactctaatgctggctaaaaggaaaaaagttcagtttagggtttaaaaccctgatgctgactaaaagagaattcagtttagggtttaaaaccctaatgctgattgcatggaaaagctcagtttagagtttaaaactctaatgctggctaaaaggaaaaagttcagtttagggtttaaaaccctaatgctgactaaaaggaaaattcagtttagggtttaaaaccctaatgctgattgcattggaaaagctcagtttagagtttaaaactctaatgctggctaaaaggaaaaagttcagtttagggtttaaaaccctaatgctgactaaaaggaaaattcagtttagggtttaaaaccctaatgctgattgcattggaaaagctcagtttagagtttaaaactctaatgctggctaaaaggaaaaagttcagtttagggtttaaaaccctaatgctgactaaaaggaaaattcagtttagggtttaaaaccctaatgctgattgccttggaaaaactcagtttagagtttaaaactctaatgctggctaaaaggaaaaagttcagtttagggtttaaaaccctaatgctgactaaaggaaaattcagtttagggtttaaaaccctaatgctgattgcattggaaaaactcagtttagagtttaaaactctaatgctggctaaaaggaaaaagttcagtttagggtttaaaaccctaatgctgactaaaggaaaattcagtttagggtttaaaaccctaatgctgattgcattggaaaagctcagtttagagtttaaaactctaatgctggctaaaaggaaaaagttcagtttagggtttaaaaccctaatgctgactaaaaggaaaattcagtttagggtttaaaaccctaatgctgattgcattggaaaagctcagtttagagtttaaaactctaatgctggctaaaaggaaaaagttcagtttagggtttaaaaccctaatgctgactaaaaggaaaattcagtttagggtttaaaaccctaatgctgattgcattggaaaagctcagtttagagtttaaaactctaatgctggctaaaaggaaaaagttcagtttagggtttaaaaccctaatgctgactaaaaggaaaattcagtttagggtttaaaaccctaatgctgattgccttggaaaaactcagtttagagtttaaaactctaatgctggctaaaaggaaaaagttctgtttagggtttaaaaccctaatgctgactaaaggaaaattcagtttagggtttaaaaccctaatgctgattgcattggaaaaactcagtttagagtttaaaactctaatgctggctaaaaggaaaaagttcagtttagggtttaaaaccctaatgctgactaaaggaaaattcagtttagggtttaaaaccctaatgctgattgcattggaaaagctcagtttagagtttaaaactctaatgctggctaaaaggaaaaagttcagtttagggtttaaaaccctaatgctgactaaaaggaaaattcagtttagggtttaaaaccctaatgctgattgcattggaaaagctcagtttagagtttaaaactctaatgctggctaaaaggaaaaagttcagtttagggtttaaaaccctaatgctgactaaaaggaaaattcagtttagggtttaaaaccctaatgctgattgcattggaaaagctcagtttagagtttaaaactctaatgctggctaaaaggaaaaagttcagtttagggtttaaaaccctaatgctgactaaaaggaaaattcagtttagggtttaaaaccctaatgctgattgccttggaaaaactcagtttagagtttaaaactctaatgctggctaaaaggaaaaagttcagtttagggtttaaaaccctaatgctgactaaaggaaaattcagtttagggtttaaaaccctaatgctgattgcattggaaaaactcagtttagagtttaaaactctaatgctggctaaaaggaaaaagttcagtttagggtttaaaaccctaatgctgactaaaggaaaattcagtttagggtttaaaaccctaatgctgattgcattggaaaagctcagtttagagtttaaaactctaatgctggctaaaaggaaaaagttcagtttagggtttaaaaccctaatgctgactaaaggaaaattcagtttagggtttaaaaccctaatgctgattggctaggggcaaagttcgagaatactaagcgacctctctctcttttttttttatttcttgttttagtagaaaatacaagggagtttcgtggaaacttacctttcgagtgaattccttattgccaaaatatttcttgcacccacgtaccttcttctttgggcgacacctgctccttgcacggttgtcttggattacacctgtttcaacttttcagacaaaggacaattgttagttcggaaatgacggtcggtttggtgaccttgatcgttcccggttgctttgttgcgtcttcatttctgttgtgaagtcccgccattgatttgattcatatgccgaaaccctttagaccgctcaggcttgtatttccagattctgtgatgatttgcctcgtaaggctctttttttttttttttttttttttttttgcatattgaggagattctgtgggagattgtacaagactctgttgggatttgtacaggggggagactctgtggggatttgtccgaaggtggacttgctggggaagatttcaagatttctctctttttcctttactccggcacaccatcaaacgtcatgatccatcatgtttgggtaattatatcaacgagatgaggtgctttccttcatgagacgggattccgtgcagacaaaccatgccacctactctttccggtgcatcctgaactctgggttaaaatgcaaaaagggattcgaaaagaaacaaagcaggggaaaacaaatcaaaaaaggaatacccttttcgggacgagaaagacttatctgaggaagataacgctggctttaaatgacatgacatgccttttggactggacgtctgaccttctaagagcttgcgttttcctgaaccagaacggacctgtgattccaaactggtgggactctgccgagactttcttggggtggcgtcattcttttcggccaacagcgccctttgcgggttttcgctggctgacctttctcatttctcttcctgtcgtcgcttgatagcactctttgcgagtttttactaaacaagctctctcattttggtttctcttctcccgtcgcctcgtggtgcccgaaggttttcaccgccgagactctctcattttatttctctcaactcagggtgtgctggtttccttttgtgatgcttattggtttcccaccatctttggtaattgatttgaaggcttgtacctggtaaagagaggtagctgatactaaacttcttaagtgtctgacatgccccggttttcaatttcagggtgaatgggattttgttgttggtgtgactgaacctcagggagaggctgcctacgtatcctttcggaatcaagtcaaacgtagttcaggcctcaatcaattttttttttttttttttttttttagaatataacggctcaaaaggtggtagcgagaattgggcagtgtttggggagtagtggggaataaacacctttgcccttttcaatgtgtgaggaccacttggagtatgatctagacgtagtacctcttgactgcatctgcattcaccgctgtgtcagggtcatttccttcgatatcacctaaatacaatgctcctcttggcaatattttccttacgatgtatgggcccttccaatttggggcaaactttccttttgcttcttcatgatgcggcaggatacgcctcagtaccaattgtcctactacgaaattccgaggtcggactttcttgttgtaagcacgggccatccttcgttggtataactgtccgtgacaaactgcagccatccgcttttcatcgatcaacgtcaattgctccagtcgagtcttaacccactcgctgtcctcgatttctgcttcgacaatgattcgaagtgaaggaatctctacctctgccggtattacggcctcggttccataaaccagaagataaggagtcgctcccaccgatgtgcgtaccgtagtgcgataccccaacaacgcaaaaggtaactgctcatgccactgtcgggaactttgtattgttttcctcaaaatcttcttgatgtttttatttgcagcttctacagcaccattggcttttggccgataaggagtggaattcctgtgtgttatcttgaattgctcgcacacatctcccatcaagtgactgttcaagtttgctgcattatctgtaatgatagtcgcaggaataccgaaacgacagataagatttgagtgtacaaaatccactacagctttcttggtgaccgacttgagagtgacagcctctacccactttgtgaagtaatcgatggcaaccagtataaacctatgtccattcgaagcctttggttcaattggtccaatgacgtccatgccccaagcgacaaatggccaaggtgcggtcatgggatgcagttccgtgggaggtgcatgaatcaaattaccgtgcacttgacactgatgacacttccggacaaagctaaagcaatccttttccatggtcatccagtaataacctgctctaaggatcttcttcgctaagacatacccgttcatgtgaggtccacacacacctgcgtgtacttcatgcatgatctttctcgcttcctcgatatcgacacatcttaagagattgaggtccggagtcctcttatataacaattcactgctcaaaaagaaaccgctcgcatgtcgcctaatggtcctcttttgatctccagttgcatgctcggggtattcttgtgtcttcaagaatttcttgatgtcatggtaccaaggctgcgtatttgatcccgcctcgattacactgcagtaaccgtgtttttccttgatttggatttccaaaggatcgacgtgggcgtcgcccgggtagggtagcatagaagctaaagtagcaagtgcatctgccagttcattgtgacacctcgggatatacctgaattctattgaggtaaagcgcttgctgaggtcctccacatgttgtcggtatgggataagtttgacatcccgagtttcccattcgccttgaacttgccggatgatcaggtcagaatctcccataatcaataagtctttgacatcctgatcgattgccatatgtatgcccataatgcaggcttcatattcagctgtattatttgtgcagaagaaacgaagtttagctgtggcgggataatgctgaccggtaggtgagatcaaaattgccccaatccctatacccttggcattcacggctccgtcaaagaacatcttccaaacatgagcttcctctgagatcacttctacggtgtttacctcttcatctggaaaataggtatccaatggctggtattcctcatcgaccgggttttcggccaaatgatctgctaacgcctgggctttcattgccgtgcgagtgacataaactatgtcgaattccgtaagcaagatttgccatttagccagtctcccagtaggcattggtttctgaaatatatatttcaagggatccaacctgcttatgaggaatgtagtgtgggcttggagataatgcctcagcttttgagcaacccatgtgagagcgcaacatgtcttctccaacagagtgtatttggcctcgtagctggtgaatttcttgctcaggtagtagatcgcctgttcccttttcccggtcacatcgtgttgccccaggacgcagccaaaagagttctccaagactgtcagatacaagaaaagtggcctccctggttcgggagggaccaagactgggggattcgaaaggtactctttgactttatcaaaggcttcttgacactccgttgtccacttaatcgccgcatcttttcttaacaacttgaatatgggctcacacgtgcttgtcagctgggcaataaaccgactgatgtagttcagcctgcccaaaagactcatcacgtctttcttcgttcttgggggaggtagatctttgatagattttatcttagtcggatctagctcgatacctctcctgcttacgatgaaacccaaaagtttacctgacggaactccgaaagcgcatttggctggatttagcttcaagtcatacttccttagcctctcgaagaatttcctcaagtcttggatgtggttatcctgcgtcctggacttgactatgacatcgtccacgtacacctctatttcctgatgcatcatgtcatggaaaatggcggtcatggccctcatataagtagccccagcattctttaaaccaaacggcatgacccgataacagtaggtgccccaaggcgtggtgaaggcagttttctcggcatcctcttcatccatcaatacctgatgatacccagcgtaacaatctacgaaagactgtatctcgtgcttggcgcaattgtcaacgaggatgtggatgttgggcagcgggaaattatctttaggacttgctctgttcagatcttggtaatctacacatactcgagttttcccgtcctttttcggtactggaaccacattcgccaaccatgttgtatattggactacccggatcactcctgttttcagttgcttggtgatctcctctttaattttgtcactgacctcgattttgaactttcgttgcttttgtttaaccggaggacaatcaggatgaatcggcaatttgtgaaccactagatcgacacctagtcccggcatgtcatcatatgaccaagcaaacatgtctttaaattcaagaagaagttgaattatcgcctctcgcgttttcttgtccgtgtgaatgcttatcttggtctcccggatttcttccggggttcctaaatttaccggttcagtgtcattcagatttggcttaggtttattctcgaaatattccaactctcggtttatctccctaaaagcctcttccgcatcatattctggttctggatccattaattcgcagttaaatagctcattgtgatccgggcgtgaagtccgcaagcatgtcatatttaaagccgcattattaggactgaaaaggaagataagaggaaaagtaataaaatcagaacgaaagaaagaaaggaaagcaatgaagattttttttttttcattttctttggaaaattggaagacaacaacgtttacaactaggaattcagaacaaaaaatgaaaagaagaaaacgttcaagttatgtcccggagataacttgtgatacaagaaaggtggcaggacaggtctacccggacttccgtctagttgggaatggcgtgatctcccagttttggagcttggcgtttggccccatgtatatcatctcagcagtgctcgtaccttcgcctggttgaaccatatggacctcgtagagcatttccctcattgccccacatatttcctcgatttcctcaactgtgaagacctcatcttcttcttcttcagtgtaccctggcctgacaaaagtcgcatgtaaatccggcagtggttgaggcaacttccagccctcatttctccttttctttgcccatttttcgtctgctggagtaggtttgaaacctagtccaaaaggtttcttgatgactggtaaagtaatgggttccgtcattccctgaagggttcgtccaagccccttccctggcctaaatccgtgtcggatcatctctttggccaccataaccgaagcgttagacaagaaaggctgggggcaaggtactccctcttcgtgctgctctgccaataccacctcgaaagcttgatagaccgtatgctcactcccttctcttggttcaagatacgggatagatgggtcccgataaatggcatgttcatcttctccatggaccacgatctcttggtcttcatactcgaacttcaccatctggtgaagagtagaaggcacggctcctgccgcatggatccaaggcctgccaaggaggaaattgtaagatgtgtccatgtcgatcacttggaaagtgactcgagatttgactggtcctatgaccatcaacaggtctatttctcccatggtgtctctcttgataccatcgaaagctctcacgcagacgttgttgggtcgaattcttccggtctcaatttccattctttgcagcgtggagagcgggcagatgtcaacacctgatcccccatccagcatcacccgcttgacatagtagtcctcacatttgactgttaaatgcaatgccttgttgtgtgctgctccttccgggggtagatcgttcttgctgaaggagatttggttgacggcgaagaatctttctgtcatccgctctagttgctccaccgaggtttcgaccggtacgtatgcttcattcagggttttcagcaggatcttttgatgctcagttgacttcattaatagtgacagcatggacacttgctcagggtgcttgcgcagctggtctatcacttcataatccggcatcttcatctgcttgaagaacacttccgcttcttcaacactcacaggctcctttggagggaagcgcctttgtgtggcgttgttcagttcttgggtatttgagtaccctccaacgaaagtattttctggaagttcttccatgacctccttacctttgtatgttaccaaagtcttttgataattccacggtactgtggacgggttggtcattggcttttgtggcacgcgtccgataaccactggctcattcagccgaggtggttgaatcgtcccccggaccacataggccccttttggcacatacataggttttgtctttttgatcccgaagttctgcgtcttcttggcttgacctcgcggtatgtaaagaactccaccctttgccggtaccactttcttctccaccttcttttcgggcttgctttctgcagccttggcctcctcccccctttctgatttctggtctgtttcgggcctcttcgctgtgtcgacaatggcaattatggatttcaaagcagggtcgaactctttgtcttcacaaatcatgccgatcagcggcccattattgtgagcgggcaatggattgttagttacattcgggatctcttcgtcccttagcactattttcccctgctctatcaaattttcgaccactcttttcaatgaccagcagtcatttgtatcatgcccctcggcccctgaatgataggcgcatctgactccggctttgtaagaaggagatgtcgggttctgccttgtttgagggatgggttgcaggaaacccaactgaaccaactttgggaacaaagttgagtatggctcaccgatgggcgtgaaagtccgccgtcgaggtggctcttgggggcggtagttattttgcgggggttgtgggttatagtggttgcggtaaggaggctgatttctgggaggtggagctgggcctcggttggcttgttgtgatgaatggttataaggttgggcattcatgaccatataaggttgatgagcatatgccacatttgagtgggggtagtagtgttgtggggccctttccggaaaatggggcctgggatgacgatactcccttgcttcagaggctgccatagccgtttcttccttcttcttcccccttgtcgttcctcccgacccgctttggacggcctgggaggttgcccttatggctgcttgactcagaatccgacccgttttcagcccattctctaccatctctcctatcttgattgcttccgcgaatggcttacccatggccgacatcatgttttggaaatagtcagactcttgagcctggagaaaggtagtgaccatttccacttcatccatgggaggcttcactctcgacgcctgttcacgccacttaatagcatactctctaaaactttccgaaggcttcttcttcaaattcgacagagagtttcggtctggcgcaatgtcgatgttatactggaattgctttacaaaatctctggcgagatcatcccatatatgccatcgggacatttcctgatccatataccactccgaagctatccctactaagctttccccaaaatacgccattagcagttcttcctttccgccggctccccgcaattggttgcagtattttttaagatgtgcaatggggtcaccgtgcccatcgtatttctcgaatttgggggtcttgaaccccgtcggcaggtgcacgtgagggaacatgcacaggtcggcgtaagagacgctcttttgtccgctcaacccttgcatattcttcaaactttgttcaaggcttctcattctcttagcaatctcattttgttctgcaatcctggggttctgatcctgtcctggtgcgagttcgcactgaggcggtagaggattattgttggtagcgaacctggttggttccattgagaacgatggtgcttggaatgtaaaagaggatgagtcaaaggttggcttgtatgtggcaggctgtgccgtagctgggcaaggcgatgcagtaaagatgttcatgcttgcatcagtggccgacattcggggatgaggctcagaaggtgatcctgcggagagagcggagttggctgggtacccgaatggggtagcagggtaatttatggggacattagaagtcccacttgacctggagaataattcagggaatccggggacgacacttggcggctctttcccattgttccagtcatccagcatttccaacatgcggagccgcaggattctattttcttctgcagttgcggattcaggcgtgaggacggctgagattgagctctcctcagagacggggactgtttgcaatggaatttccgaagacatttccacacttccttttgacctggtgaagtaggtgtgagtactgtttctggtcctaaaaataggtagttgaacacctctccttgacctcgtgaagtatgagtgcgaggccagactttcaccaaaccaaccgtcttttcaaaaaccctggaaacatgctcaatgacaagcgcacggttaatttgcatgcaaataacagatagttagtctcacgttgggcatgatgcacctatacagttaagtggattactatatgtctgctacgagagcatgcgtcattccggtattttcccccttttttctttttttttttttttttaattttattttcatttatttttcttttatatattttttttttttttgtagcgaaataaaatgcgatcggatccgattaggattgcctacgtatcacgatactcacgtgaatcagatcattacgtagttcgaaaacacaaatgagcatgaaagaagccaattctttattattgaagcagtctattacaaactacattttgcaaaaggaaaagcaaactttgaaaataaacctagactcaaaaaataaactaaaaatcaccctgatgaaaaaaaaaaaacaggcagaagatgctaagatacagatttgacctatgaatgcattatggttttaaaaattggtttccgcggggcgtcgttcggcctcgccgcggtcctaggcgtgagatccctctcaagttgctctagctcgtgcatagtctgcttgacataaaccattactgccgagaggaaggtaacactagacatgttctcacatcgtagacatcgtctggtgatggcgtgggcaacggctttgatcctatctctggtttgcttcttctctacaagcaggtgctttatctgatcgctgcatatcttgaagacttgaacatcttgcatgtgttgatgcttcaatcgtcgtacttccaatttcatatgggctattgtgtcataccagtatctgctttccatttggaaatccttggcctgactagctgctttgatttcaagtgctgccatctctctctttattttagcaatagtcttctcgtggtcgccttccaattgattcaggtgtctgcgatgcttatctgctcttgtatcccactgtgccttgagctctgctatgatgttttcagatttctccaaaccatctcgccattccctgatttcaccttttagcccttttatcagctgctcgtccgatcgacgccttggttgtctatctgcatcccaccttatctgtttgatctgggctctgagcatttcattttcttgaatcaatctgttccgttctcccagatcggtagcaacttgcacgttgtgttcatatttcaatttttccacttgttgctttaacccgctgatttcggtgcaatagcctctttcttttgctaaccaatcccactgcttttgtgatgattcggtaaaattccggatgtggggtctcttagctggcctttcgtgctcgagttcccttctgtaccatgcaaggtaacctggcgccgtttctcctttggcttgatcccgcacgcaagtatctgatttcaaatattgaccctcattccagatttggcgaatctttgcttctgggaactgtccgttaggacttatctcgattgcttgagtgcttagatcttcctcacgaggtactgtctggcattttccgaactgtcttaaaactcggccgggtgcgtaaggttgaatgctcttaagccccattagcaagaaatgagttttagtcgctgacatatataagacctcatcaacgggcaaccatcccaacttccattgtatttggctggcagtaagagcttgaaagaacgaggtccaagccaggactccttcgggcaaactgatctctttggctcttgcgtaagattcttctatgcgggtcttatccggggaaccacggctcaaaatctcggaatgatggcaaaggtgctcggtcatccatatctgcaggagcaagttacaaccttcgaagaaatttcccccagctttacaagctgtgagagctcgaaagatgtcggataccaccataggcgcgagagtactgtcactttgcgtgagtaaagtgctgacgacccccgatatcttcaaatcaatgtttccatctttcctgggaaataccagaagtcccagaaacgttatcatgaacgccacccgtctgtgctcgtcccacttctgacgaactcctttgctgcacagtttgttgattggattattgaatcccccctcgtgaccgtatctatcatatatgaagcatggagtacagaacccggctgctagatccgggttgtggactgttctaggtattttcaatgaatccaggaaccgatgtactgtgacgactcttggggcgaccaagtatttttccctcagcggaagttcagtattcccgatgtatccggccatttcttctaaagttggggtgagctcaaaatcagagaaatggaaaacattgtgcgccgggtcccaataggtaaccaaagctcttatgatatctccccgaggctggatttccaacagacccacaagacctttcagatttttcttaacctcattttgcccttcaacacctagatcattccaccatagccgtaacttgatagggattttggtcattattgaaaaatgttcattttgcatcgtgctcatcctgcacatttattaaggtgattttaacaaaaatgactgactcaaaatattttacagaggggaccaagctttgaacacggcctttaagcacttcggggaagaagattttaaggttgtgtgggtctaaaaatgctaatgaaaacccaaaagtggctatttatgcaaagtcaaccttccggcgtccctttcgagaacattcggctattcatgtcaaaacagcatcacctgacttatttatgactctttaaaaaatttgaaacatatttttttttgattttggctattttagcaaaatgggggttgaacccgacgagggttgcctacgtatctcacatccggtgagaatcaaaccggcgtagttcggggataccgcgaatagagaaaattaaataaacctaaaaatcagaaataagtatttttttttattattcttgaagaaagataaagactaaagaaaaaataatttttttttggcaatatttggactaatcagtctgaatttataaaaagggtattacaagagaaaattttttgaattatgagttttccatttttttttacttttaaaaataaataccatttcttttttttctattttgaaagcgaaagaattttttttttttattattatatataccccccttttttaataatttaaactaagaagacaaattttgtttttattctttctttttcttttttttttagaacaattccggtgaggttttgacaatacttgaacattggttttatttttccaaaataagtaattatccttccacgttgctattttcctcttttttttttagaaaccggtcagcatgcggaaccgaagcaaataaatgcacaaaacaaataggatgcagcagggtggtcttttcaattcaggttgcctgtcctagacggacccaacccctgtgttgagccccctaagtcaagtgcatcatgatgcaaataaacgttcctactagggatccggcatgaagtttcgttatactaggtttaaaccttggtatttgttctagactgtgtacccgagcggaccaactcgagtcgaggaggggctacgtaccggggacccgcgagatcgtccggctttgtaacttgtccgtcctctttcttattttaggtattgacattaacagaatagggagtctcgaccagcgagcttctccccggaggtaagaagagaagggtttcgacacagtttatatacagttcagataatatcaaagcggtaaagacagcattatgcaaaaacatgtaataaagatcagataataaagccaaatataacaattattctaagctcgaattcttgaaccctgaaccagtggttctgggtccactttgtccccagcggagtcgccagagctgtcacacctcctttttgcgcgccctgccccgaggggttaggtgcgcgggtggagttttttccaatttaagtgacaatattcgaaatgggattattcatttaattcagagtcgccacttgggaaaggtttggcttttggtgtcccaagtcaccggtttatcttgaatcccaaatcgaggaaatttttgacttttccaaatgaagtctacgaaccagaaattctaagtaaggaattctgttgacccgagggaaggtgttaggcaccctcgaatcccgtggttctagcacggtcgcttaaattgttataatggctaaatatctgatttaaatacatatcatgacttaacgcctttattaagtttaaaccacttttgttattatcatttattttatagaattgcaacgtcgtgaaaatgcatctcgaaccacgtcacaatcaatgcacccgcagttgttaacacatttcgactccattgagatttgaatttgggtcgcataaatgcgcacccgaatttaagaatgtaatctaattaagccgcgcctaaagggtctaacgcgttatgatttctgagaaggccatgagattcactaaatggcctagcccgaattctaaatattatgattagttgaaggccccgcaattcgcatttttttttctttttacttggcgaggctcgtctcattaaaataaaacctacaatgactacatttcttattgttttcatttccagaaatggaagaaggaaagatgcatgttaattgaaataaaaaaaacggattactatcaattcctaatcacttataaaaatgaaaggacgccataccttacgaaatattttggttgaacaaggaagctatatggaggtggatgaaatgcaatacttaattcggacatttcctcgaatcgagcttaactagacttatttaagctaggttaaggaaatcgaatgctaggcattgttactaatggtgattcgaacatgtacctatatgttgcctaacggtcttgataaatggaaggaagataacacagaacattattgtgtaggtggaaatattctatcttatgcatgtcattatctgatgggaaaccagtcgaaaattctgtgccaattatccacaccttctatatattatactattacatcttgtacttagcaaacaactagaaactaagatgcaaaaaagcaaacttgattgagtattgtctaactaatctttcactactggattacactaatcaatttatacgacagagatcagtgtatcacaaacagcacaaaacagacatctgaatcttcttcaagaactcctttcatttcatgcttttgaactgttacagttaacaccaaagtgggatttgaaatgtgtacctggaacaacactgaatactgaaatgcaaagaagaagtgaagcagaaaatcagcaacagcaggaaaccaaatagcagcagcaacagcaggtaaccagatagaaagcagaatcccagtacaagatgcagctggagccaatgaaagatgacagggtgtggcaagttcccagtaatatgaatcaaaatttaggcaaaaatagatctggggatgcactgatgctacacacaactaaaaatctcaaacagaacttaggagaaaagatatggaacagggaaatccggccagatgagagttaagacaaagggggaaagatgcagttcctctttcctgtgttatcctccctatatctattcctgtctgtgtgtatttatctgtatgtatttccactctctcttccaaaactcctcccagtgtctgtattttttaacagccctcaaggtccagtctgtatatgcctatctcctccagatggtatctccctttcaaaactcctcacagtatctgtatttttctttctcttcctctaattctgtctatttctatctcctaattctgtccctctctatatccctgtgtgtgtgtcctcccagaacttctattccccccttttataagcctcaaaactcaaacctttatcagcctgtttggattaatcaaataccccctcccatgtgctccctttttcagttccactttagctatttaagtattaatcccatgacattcccttggcaggctttaacttttcattttattatctaaaagcaagtatgggcattaaaatatatctgacagcatatactgtcagattgtttaaacttaaaagcttcttaatgcagaaaaacaggctgtgcacaaggcacatgaggtgcaccaatgcacatgctgtgcaccagtgcacatgccttccaattcaggatttaaacataaacaatcccttttttacattgactgatccaaatcaaacagctataagtaaacaaaactggttctgaattgatttcaacaaatgttcaacagaagcaaatcgatttactatgctcagacagttgaaattaattgacgacacatgtcgactcgactatattagtatgaacatacacaatcgtagccaaaaatcagacatttaaacaatattgatacatggttcgtattatactgactaagcaggaatacactcgaggagtcaaactagtcagtccaaactcgaaaatcagctacttgcacaaacaaatacataatgccttatcagaataggaggggggaatttagacaaacaaacagaggttcaggcgaagtagttgaagcacagttgatagaggtcaaagacataaacagaaaacgaacagacccttacaacaaacaaacaaaccaaaaacaactaagaaaagaaagaaaactcaccttaaaccgcaaaaagatcaaaaccttaactcagacttggtcaagcctttcttaaggctgaacggactttaaacgaagtgtttctcagacgagaaacacttggattaaagtccattagaccttaacctctttggttcgaacggatatggaccagtgacgaagaacccacaaattccaaaactcagatctgggattcatgcttccctgatcagattcggaccaaaccaagtatggtttggtcacgaggggggtctggggagtatctggtacaaaactgggattggttgggtcagatcgagttttgactcgaatcttcgaatgaagattcgaggacctggggggtgattcgaaacatggggttggtagatttgggttcaggatggcctgggggtcctatggtgttcaagggaaggtcaccggcgtccatgccgccggctttcatggcggaagtatgcagaggcggctagggtttagggctgttcgtttggggagacgaagcagctggggtattggatagggggggtagggtagtgttatgtacttatatagttagtgggcaagtggatcctggccgttggatgagacgagatgaagggccaggatccttcggctaacagggaacgacgtcgttccaagggtgaagggttagggtcggtccgggtgagacgggtcgggtttattggtgggttatggggattgatcttggaccgttggatcggcttggtttaaacggttgtgatgggttggcattgaaacgacgtagctttggtgttaaactacgtcgtttcatggcctgggggtgggctgtttggactggtggcttgggctgtccgcttgggctgagttcgttgggccaattttaacaaattggcccaagtccggaagggccttttctttctctttttttttttttttattttttttttatttttatttcttttcttatttattttaaaacaaaactaagccaaagaatcaaattaaaattaaatacacattcaaatacaattatttgcacacatactaaaacatttcaaaatcggtaaagtcaaaccaaacaaaatcacggacgaaaaatgcctattcacgatcttctatttaacgaccgaattacggtttgaattacgcaggacacatatatattttttgaattttattttaataaagtaaataaataagaatgggccaaaagcacaaataaatccacaaggtgccgcacaaaaatccgaaattgtaccgcggggccaattatatattttttatttctttttggagcgattgtcgtgtgaagcaaaaatcacgtgctcacaacggcaacactcttcgcgcttttactctctttcctcaccatataatcaatataatcggcacggaatggtacatcgtgcggcacgacatcacccttcgtgctttacactctttcctcacaaattatacacgacatcacccttcctgccttatactctttcctcacaaaaacaatgcacgacatcacccttcgtgctttaactctcttcctcacccaaacaacaatcataaacaatcgggcaagggaataaatgaaatcataataagaatcccggcaagggaacaacatttcaacaatttagtcccggtaagggaacaacatcaataatatcaacatcccggcaagggagataacaaataaagcaacaataacccgacaagggtggcgacataatgatatcttctctttctcacttttatttcacaattcacttcacaactcgagccaatactctagaggttcaattatcatttatactttcacaattcacttcacaactcgggccaatgttcataggccacaattacttccacaaactttacacaacaaatagaaatcttcaccaaggtatgaaaatacaacgaactcatgaaaatcacaatataagactcacgagcatgctagacaccagcgtatagatactcgtcaccatgcctatacgtcgtactccacaattaccacatagcaaataggactcgactcctaatccctcaagctaaggttagaccaaaaacttacctcgatgccacgaacacaattcacgtttcaattatagctttaccccttgattccaccaccaatacgctcgtatctagtcacaagttacttaattacatcaataaacgctaaatgaatcaattcgaatgcatgaaaatgaatttcccaaagttttacccaaaaagtcaaaattcgcccctaggtccacatggtcaaaacctgaggttcgaaccaaaacccgattacccattcccctacgaacacaaatatataatttattttgaaatcggacttcaaatcgaggtccaatccccaatttttgaaaaaaactctaggttctacctaattttctccatgaaaatcattgattttgagttgaaatcatattaaaagatgttaatgattgaaggaaatgagttaaaattaacttacaatcgatttggaagaagagttgttcttgaaaaatcgccctagggaatttgtgttttgaaaagatgtgagaatgggtttaaaattcgtctaagcataaaagttgcaggttgcagatatgggaaatgtgaacagggattcgcatttgcgaacatgggttcgcatttgcaaacaagggttcgtatttgcgaaccccgacctctactgggttgggaaatgcgaagggaggctcgcatttgcgagctgggaattgcaaaccaggcatcgcatttgcgatcactggccaaattgggaaacttcgcatttgcgaagatcgtctcgcatttgcgagagggagctggtctgggcttctttcgcaattgcgacaagccgctcgcatttgcgatatctcatttgcgagccaggcttcgaaacctttgtatatgcatcccgtggcctatccaaaactcacccgaactctcggagctccaaaccaaatatacacacaacctcaaaaatatcctacggacttatttgtataatcaaatcaccaaaataacatcataaacatcaaattaaacctcaaaatcaatgaaatttctcaaaacttctttaaatatcaaatttgcatttaaggtccgaatcacatcaaatggattccgtttcttaccaaactttaccgacaatacatataaatcatagtgaacctgtaccgggtgccggaaccaaaatacgggcccgatactatcaaattccacataacatttcactttcaaaaacctttatattttttcagaaaacaatttctttcaaaaaattcattcctcgggcttgggacctcggaattcgattccgggcgtacgcccaagtcccatattttcctacggaccctccgggaccgtcaaatcatgggtccgggttcgtttacccaaaacgttgaccgaagtcaaactaatttattttatagtcaaaatttatcatttttcatagatttccccttatagcttttcggctacgcgcctggactgcgcacgcaaatcgagatgatgctaaaatagggttttaaagcctcagaatgccgaatttcattttaaaataagtaatgaccttttcacagttttgcgaaagtttaaactatatactaagtgcaacatcaaccgaaaaatctttccctttttgttgattttgtgtgcacaaggaattaataaaatcccaattattttcttatttgttccaactctttcaagaagatgatatcactattatgatgtacatgtggtctttctttttcttcatgtaacttgaccatgttctgcgaaaatcaaacagcctttagtagtctttattatctactgcacaacgtggtgtgatacgtttatttccggaagctatcattgtcaagttgtatatgtatcagttgaacatatgaacctttctaaccaaagccatcttgctaatctagaggtctgcagagctttagttttgtccatgtgaattattgctggtgtgttattctctattttgttatttctcacttagtcagttcgtgaaataaatgcacatttcatccaaattactgtcgtctctaacataataacccttcagtttatctttatccatagtgcttgaaaattaattgcttgaatttttgttctttaatttcattgtttggccaaacttattgaaaatatattgacttctatgttgggcccgggcgttgcaccggaaatgcctatctagtacatatgataagacattccgtgagcttagatgtatagaagaaggatttgctaaattgtaaactatatgttaagctcaacatcaatcgaaaaatcttccttcctttttgttgattgtacgtgcataaggaattaataaaatcccaattattttctttttcattccaattctatcaagaagatgatatttgcaactgtgtacatttgatctttctttttcttcttctaacttgaccatgttctgaagatatttgctgaaaattctcttttagtaatcaaaacgttacaattcaaatcgcatgtgttctcaaatcaagaagaccattatcgcctattta

SEQ ID NO: 86 - DNA, 4250 bp, Artificial Sequence
  Description of Artificial Sequence: Synthetic polynucleotide
atggctgatgtagcagtgaattttctggtagagaatttgatgcagttgttgagggacaatacagagctaatatttggagtgaaaggtgaggcagagaatctgcttcaagatttgagtgagttcaatgcgtttctgaagcaagcagacaagtcccgcagcgataacgaagttctaaaagaattggtgaagagtatcagaaaagtgacgaatgattctgaagacgctattgataagtttgtaattgaggcaaagcttcacaaggacaaaggggtaggcaggtttgtggacattgcgcattataaaagagtgaaagatgtagcccttgagattaaaggtatcagagatagggtgaaagaaatccgtctgaacaatgcacatggccttcaagctcttcaagatgatgatccatccaacagaggcgtggaagacagaaaggtacctatattatatatgccttcaatcattcattttttgcccttaatttgcgccgaacccgctcggaacactttagctccgcccctgcctgccatgtttgttgttggtatcatgtaaaattttagcatgtaactcaacaccacaagtcaatgagacaacgaatgcagtaacccagctagggctatgcatcagtcgggtcggatcggatcagatcgaatttaacacatttcgaattgtaaattcggattccgatttttataaaatgcaatccgaatccaatccaaattaaattggatcggattggattttaaagtttgaatcgggtaaatatttcggattttcgaatcagatagtatgccttattaaggctactaacaatctaatcggctactacactttataaggcttaaattgaaaggcaacaaatgtcttttatagcaatagacaaaacaaagctccatagcaaaataaaataaactaaaattccaaacaaatgttatctcggctgggaatcaagccccaactcagagctgtgggccaggttgctttgctttatcggatcaatcagtatgcggtgggcaagctctttcccaagtcgctgagctgtttaacagagggaaggaaaaagaaatgacaaaacaaaaactacaaaggaaaaagaatcgaatctcgctcattttcaggtaagatttacttagctcgctccttgctcgcgaagcggcataccaataaaaagaaaagcgttatcggatttccatcgtcgttgtccgtcgataggaaggagatactgagaatgagagacacaaagataagacttaagagaagcgaactaacaagtgaggcttgctcagttgataaaagcacctctacccacgaccgttaggtcctgggttcgagtcatgctggaggagaagggtggaaacactatagatcctcctaaattgggagggatattaaaaaaaaaaaaaaaaaaaagagaagcgaatagagcaatttgaagagaagttagagagagacttcgatataaactaagaaaaaataagtctaaagagagtggatgggttcggattctcggatatccgatccaaatgcacagccctaaacccagcattgcatttatatatatatatatatatatatatatatatatatatatatttaacaggtttagactccttaataagaatgaaggtgagtaagattagatgacaatatgctgcttaaatataaccaattcagatgtctccattgagcctccagcagaatataatggtacaatcaacggaactgtattgcacttaaatatactttgcacaggaagatactcctgcgcaaagttcatagaatgattatcaattttatatgagaagccgacataatcaacaaaatgagtatcgtaaaaatgtgaaagtaagaaggatgtgtggcatttcttggacaatatctatattgttgtaatgttagtgttctatatatgtcttgggaaaatccacctttgcttctatttactactgagtatcaatttttccaatacaaaacaaagctaatcacctatcttttaattaagctgcacaaatgcgtacgtaatacaatatgttttggttgaatataatgtttcttttcttgccaatgaacgttaacttcatatatatgtctaatcttcatctttgatattaatttaaaagcctcccgtggttgaggaagatgatgtggtgggctttgatgaggaggcacagaaggtaatcgaccgtcttcttgacagatcagatgaattagaggttattccagttgtaggaatgcctggtcttggcaaaaccacactagcaactaagattttcaagcatcggaaggttgaatacgagttctttactcgagtttgggtttatgtctcgcaatcatacaagacaagagaattatatctcaacatcattagcaaattcaccggaaaaacaaaacaataccaatatatgtgtgggaacgtatcaagattgctttcccgaacaacaaaaagtgcaatagagtattgttgaccactcgagatcacaaggtggctcatcattgcaacaatactccacatgatttaaaatttcttagcgatgaggaaagttggatgttgctagagaagaaagtttttcacaaggctaaatgtcctccggaattggaaagacctggacagagcatagccaggaagtgtaagggacttccccttgcaattgtggtgattgcaggagctctaatagggaaacgcaagacaacaagggagtgggagcaagtggatcagagtgttggtgaacacctcattaatagaaaccagccaaagaattgtaataaaattggtgcaaatgagttatgatcgtttgccttacgacttgaaagcatgctttttgtattgtggtgcatttcccagaggctttgagatccctgcttggaatttgatccgtttatggatcgccgaaggcttcatccaatacaaagggcccttatcccttgaacgtaaagcagaggattacttgaatgatctcgtcaacagaaacttagtgatgataattcaaaggacgtctgatggacaaatcaaaacatgtcgtgttcatgacatgttgcatgagttttgctggcaagaggccacaacagaagaaaatcttttccaagaggtaaaattaggtgttgggcaatttgctcgtgagatacagcaactatccacctaccgccgcttgtgcattcattcctcagttctggaattcatttctatgaagccctctggtgagcatgttaggtcattcctatgtttttcttcagaaaaaattgacatgcccccggttgacatcccaaacataccaaaagactttccattgctaagggtgttggatgctgaatccatcaaattcagttgcttttgcagggagtttttccaattgtattttctgaggtatattgctttctcatctgactttatcaagatccttcctaaacatattggggaactatggaacgtacaaaccctcattgttaacacacaacagagcaatcttgatattcaagcagacatatggaacatgccacggctgaggcatctgcacactaacacgtccgctaaattgcctacgcctgttgccccaaaaagtagcaaggttacctcggtaaatcaatgcctacaaactctctccacaattgcaccagaaagctgcacagaagaagttttttcaagggctccaaacttgaaaaaactgggcattcgtggtaaaatctttatgcttctggaaccaaataagtccgaattgttcaacaatgttaagaagctacaatgtcttgagaacttgaagctgataaatgttggtcaaagtgggaaacaattacgccttcctccaacatatatatttccgacaaatttgaggaagctaacattattagatacctggttggagtgggatgatatgtctgtattgggccagttagagtaccttgaagtcttgaagctgaaagacaatgcatttaagggagaatactgggaaccaaaagttggaggttttcgttccctactagtgttatggatcgaaaggtcagatttagcttcttggaatgcttcaagtgatcactttccaagacttaagcgtcttgttctcgtatcatgtgataaacttgaggaggtccccattggcttggctgatatacgcggcctccaagttatggagttgcgaaattcaaccaagcaaacagcaaaatctgcccgggatatacaggccaaaaaagacaagcaaactcaagaaggggctaaaacccaaaggttcaagctttctatattccctccttatctctga

SEQ ID NO: 87 - DNA, 2639 bp, Artificial Sequence; identical to SEQ ID NO: 13
  Description of Artificial Sequence: Synthetic polynucleotide

SEQ ID NO: 88 - DNA, 522 bp, Artificial Sequence
  Description of Artificial Sequence: Synthetic polynucleotide
atgatcggtaggtgaacttaactatctcaccaatactcggccagatatttgttttcttttctttgccttagtcaatttatgcaaaggccttctctttcacatttttctactggtctcagagtgttctgatatctttgatcagacccaggccaaggtatccttctctcttctgctccctcttttgatcttgtcgctttttgtgatgctgactgggctgcttgtaaagattctcgtcactccgtcagtggtttttttattactcttggaggtgcccctatttcttggaaatcgaagaagcaaatctccatctccttgtcatccgctgaatttgagtatcgatccatgagatgggtgactgctaagatcacttggcttgttcgactccttgctgatttatctactcctccaactttgccggttcctttacactctgacagtctggcggcgattcatatcgcccgcaatcccatcttccacgaacgaactaaacatgtagagttggattgccatttcgttcgatag

SEQ ID NO: 89 - DNA, 462 bp, Artificial Sequence
  Description of Artificial Sequence: Synthetic polynucleotide
atgggactaaatgatgtctattcccaggcaagaggaaacatccttatgatgaatccattgtctagaatagatttttcttattcacttcttctacaagataaaaatcaaagggagatatatgcaagatcacagttcaatgctgatgcttcctcattcatggtaggagttcaaggtaaggctccacagaaaaacaacaatcagtcacaacaaaagtcatggactaattcacaaaaggttaataacacacagcagaaacctaagggaaggaaagcaaaatttaatcctaatatgaactatacatattgcatgagaattgggcatgtcagggtagattgttataggctaaatgggtttccagatgatttccaattcaccatatcaacacaggtcaaggctaatgctatagttaaaggacaagacaatgacaatggaagcactcaaagcaatgatggaacaccttaa

SEQ ID NO: 90 - DNA, 1593 bp, Artificial Sequence
  Description of Artificial Sequence: Synthetic polynucleotide
atggaaatcgacttgaacattcaagagttgctagtgatcgatgattcagatttgcttatgcaccaggtacaaggagagtgggccaccaagaattccaagatattgccatatctgcaccatgtgcaggaattaagaaagaggttcatgaagatagaatttcgacatgtgcccagaattcagaatgagtttgtcgatgcagtagccaccttgtcatctatgatacaacatccatataaaaattatattgatcccatcccagtgaagatccataatcagtcggcatattgcgctcatgttgaagaagaaatagatggaaagccttggttccatgacatcaagaagtatttgtcaaagggagaatatcttgagcacgcaaaccacactcagaaatgcacactccagagattttacaatcacttcttccacggcggaggaaatttgtacaggagaactcctgatttgggtttcctaagatgtgtcgatgcaaaggaagcttctaagctacttgaggatgtacatgccgggacttgtggcctgcacatgaatggtttcgtcttggctaagaagatacttagggtcggttacttttggatgaccatggaaacggattgcatccagtatgtccgcaaatgctttcaataccaggtgcatgccgatatgataaaagtgccgccaaacgagctcaatgtaacaagctctcattagccattcgccgcttggggaatggatgttattggtccgatttagcccactgcttcacacgaacacaggtttattctagtagccattgattacttcacaaaatgggtagaggttgcatcttacaaagctgtaaccaaaagagtcatcgtagattttgtcaaggatcgaattgtttgtcgattaggagttcccgagtccattcttactaataatgccgccaacctcaatagtgatctgataaaagccatgggtgaaactttcaaaatcaagcacaagaattccacaacctacaaacctcagatgaatagagccgtagaagcggccaacaaaaacatcaagaagatactaaggaagatggtagagaatcacaaatagtggcacgaaaagctaccatttgctttattgggatatcgcactatggttcgcacattaaccagggcaacttcctacatgctagtttacggtaccgaagttgtcatcccagccgaagtagagattgcttctttgagagtcatataggaagctgaactcagcgatgcagaatagataagaagtcgctatgaacaattggccttcatcgatggaaagaggatgaatgcagtgtgccaaggccaaatttatcagaacataatgtccagagctttcaactaaagggtcaaactaaggcaatttacaccaggtcagttggtgctgcagaagatcttcccacattaagatgaatcaaaagggaaattctccctcaactggcaaggttcgtatatggttcacagggtgctgacaggaggagcacccatacttgcaaaaattgatggagcaatttggccaaaaccaattaattcagacgcaatcaagagatacgatgcttggattatttacatttttctcatctaa

SEQ ID NO: 91 - DNA, 2919 bp, Artificial Sequence; identical to SEQ ID NO: 76
  Description of Artificial Sequence: Synthetic polynucleotide

SEQ ID NO: 92 - DNA, 3518 bp, Artificial Sequence
  Description of Artificial Sequence: Synthetic polynucleotide
atggcgaggacacgcgcttccttatcgaccgagcagcagcccgagcccccagcagcagctcctattaggggcagagggcgaggccatgctagaggccgaggtaggggcagagctcagccccgagcagcagttccagaggtggagcctcatgttgattatgatgaggaggttccagctccagtaactttggtgggcctaactcaggtcccagagggttttattgccaccctagttcttcaggacgccctggttcaattggtgggccttatggagagagtcacccgaatatgttttcttcctgtagcaccagccacttctctggctggaggaggggctcagactccttctacacgcactccggagtaggtagctccccagattcagattccagcggtttagctagttagggtagttcagccgggtgccatagctcagaccggcgatggagcggctatgttcgtcgatgctttgtggagactggataggttcaccaagctcttcacttctacttttgccggtgcatttactgaggatccccaggattatctagaaagcttccacgaggttctgagaaacatgggtattattgagaccaatggggttgattttgctacatttcgcttgtctggatccgccaagacttggtggagggattattgcttagcgagaccagccggatctccatctttgacttgggagcagtttacagtgttgtttctagagaagtttctccccgttacttagagagaggcctatcggaggcactttgagcgcctccagtagggttctatgactgttacccagtatgagaccaggttcaacgatttagctcgccatgctctcatcatacttcccaccgagagagagagggtgagaaggtttattgatggtcttattctgccaattcgtcttcagatggccaaggagggcgggagcgagatcacatttcaggaggcggtcaatgtggcccgcatagttgagatggttatgtcatatggaggtggtcataggtcggataagaggccccgtcattcaggaagattctgtggtattgcgtctggaggtagagattcgtatggtagaggccatcctcctaggctcgttcagtcagctcaccaggtatcacatggtatctcaggtggtcgtggttctcagatgcattatttggatcagtagtctttcagtgcaccaccatctcccatcagtgcaccgccacttcagaatttctgaggtggtcattcagggcaatagggtcagcagtctcagcagccgagggcttgttacacttgtggtgatatgggtcacatttctaagttttacccttgagcttcgggtagttctcaacaacagggtcctcgccttatgattcaggcaccagttgctccatagcctgcccagccagctagaggcgggggtagaggacatagaggtggaggtagaggtcatagaggtggagctcagaccgccagaggtaggggtcagccaacagccgatcgtcccagggttgtgatttagggaggtagggcccaaccccgatgttatgctttgctagccaggccagaggctaagtcatccgatgctgttattacaggtactattttggtctgtgatagagatgcttcagtgctatttgaccctggatctacgtattcacatgtgtcgtcctattttgcaccctacttggttatacgtagtgaggccttgagtattcctgtgtatgtatctacactagtaggtgattctatagtggttgattgggttcatcgttcctgtgttgtggtgtttaggggacttgagacccgtgttgatttgttgctcttagatatggtggattttgacattatattagggatggattggttgtccccgtatcatgcgatcttggattgtcatgccaagattgtgactttagccttatcggattttccccatttagagtggagagggactcctggtcattctacccgtagtgttatttcgtatgtgaaggctcggtgtatggtcgagaaggggtgtttggcctactcagcttatgttcgtgattccagtgctgagattccctctattgattctgtgaccttggttcgtgaatttcctgtggttttcccatcagacttgccaaggatgccacccgatagggatattgatttttgcatcgatttggctccgggcactcagcccatttctattccaccatatcacatgtccctgctagagttgaaagagttgaaagagcagttgcaagacttgcttgagaagggtttcattagacccagcatatcgccttggggtgcgccgactttgtttgtaaagaaaaaggatggctcgatgagaatgtgcattgattaccggcaattgaacaaggttacaattaagaataagtatccactaccgaggattgataatttgttcgatcagcttcagggtgccaaggtattttcaaagattgacttgagatgtggctaccatcagttgaggactagggcatccgatgtccctaagacagcattccgcactcggtacgggcattataagttcttggttatgtcatttgggttgaccaatgcccctgcagcctttatggatttgatgaaccgagtgttcaggacttatttggactcgttcgtgatagtcttcattgatgatattttgatatattcccgcagtcgggaggagcacgagcaacatcttagattggttcttcagaccttgaggtatagtcagttatatgctaagttctcgaagtgtgagttctggttgagctcggttgcatttctgggtcacgttgtatcagcagagggtattcaggtgggcccgaagaagatagaggtagtcaagaattagcctcgaccagctttaactacagagattcagagtttcttggggttagaaggttactaccgtcggtttgtggaggggttttcatccattgcagccccgatgaccaggttgacccagaagggagcccagttcagatggccggacgagtgtgaggcgaactttcagaagctcaagaccgctctgactacgacaccggtattggttttgcccgcaggctcagggccttatacagtctattatgatgcatctcgtattggacttgatgcagtgttgatgtaggatggcaaggtcattgcctatgcttcgaggcagttgaaggttcatgagaagaactatcctgtgcatgatttggagttggcagccattgttcacgcattgaagatttggaggcactatctgtatggcgtggcgtgtgaggtgttcacggatcataagagtctttagtatttgttcaagcaaaaggagttgaatttgaggcagaggaggtggttgaagttgttgaaagattatgacatcactatcctatatcacccgggaaagtccaatgtggtggccgataccttgagtaggaagtcagccagtatggtcagtcttgcttatattccggtcggcgagagacctcttgctttggacgttcaggatttggccaatcagttaatgaggttggatatttctga

SEQ ID NO: 93 - DNA, 2586 bp, Artificial Sequence; identical to SEQ ID NO: 17
  Description of Artificial Sequence: Synthetic polynucleotide

SEQ ID NO: 94 - DNA, 2397 bp, Artificial Sequence
  Description of Artificial Sequence: Synthetic polynucleotide
atgcaatattctgatcagcagtcctacagtgcaccaccagctcctatcagtgcactgctgctccagagttttcggggtggttattcaggtcgccagggtcagtctcagtttcctcagccacaacacttaggtggatgttttgagtgtggtgagtatggttatattaggaggacttgtccgaggttagtgggtactcagtcgcagcagcagggtttccgcgctatggttggggcaccaggttttccacagaccacccagccagctagaggttctagatgtggaggtagaggatttagaggtggagctcagaccgctagaggtggaggccagccagctacaggccgtcccagaaatgtagtccagggtggtggggcccatccctgatgttatgctcttccagccaagcccgaggctgaggctttagatgtagttattacaggtacggttcttgtttgtgatagagatgctttagtgttatttgatccagggtctacgtactcgtatgtgtcatcttattttgcaccgtatctggacatgcctagtgattcattgagtgttcctgtatatgtgtctacaccggtgggtgattctattatggtagatcgagtccatcgctcttttatagttgtgattgagggtcttgagactcgtgtagatctgttgcttctggacatggtcgatttctatgttatattggggatggactggttatcaccttaccacgctatcttagactatcatgccaagactgtgaccttagccttatcgggtttacctcgtttagagtggagaggtactcctagtcattctacccgtaggtttatctcttatgtgaaggcttggcgtatggtcgagaaggggtatttgtcctatttggcatatgttcgtgattctagtgccgaggttccctctattgattctgtacccgttgttcatgagtttcctgaggttttcacttcagacctgccaggtatgacacccgatagggatattgacatttgcattgatttggatctgggcactcagcccgtttctattccgccgtatcgtatggctccgtctgagttgaaagagttgaaggataagttgcaacacctacttgagaagggtttcattagacccttgtttcaccttggggtgcgccggtgttgtttgttaagaagaaggacggattaatgagaatgtatattgattaccggcagttgaacaaggttacaatcaagaataagtatccattgccgaggatcgatgatttgttttatcagcttcagggtgccaaggtgttctcaaagattgatttgagatctggctatcatcagttcaggattagggcatccgatgtccctaagacagctttccacactcggtatgggcattatgagttcttggtcatgtcatttgggttgatcaatgccccaacagcttttatggatttgatgaaccgcgtgtttaggccttatttggactcgtttgtgatagtcttcattgatgatattttgatatattcttgtagctgggaggaccacgagtagcatcttagagtggttcatcagaccttgagggataaccggttatatgctaagttctcgaagtgtgagttctggttgagtttagttgcatttctggcctagaccagcatcagctacacagattcagagtttcttgggattggtaggctaatatcgtcggttcgtggaggggttttcatctatcgcagccccaatgactagattaacctagaagggtgcccaattcagatggttggacgagtgtgaggcgagctttcagaagcccaagacagctctgaatacgacaccagtgttaattttgcccacagattcagggccttatacagtctattgtgatgcatatcgtattgaacttggtgcagtgttgatgcaggatggcaaggtcattgcttatgctttgcggcagttgaagattcatgagaagaactacccggtccatgatttggagttggcagccattgtttacgcattgaaaatttggagacattatctgtatggcgtggcatgtgaggtgttcacggatcacaagagtcttcagtatttgttcaagcaacaggagttgaatttgagacagaggaggtggttagagttgttgaaagattatgatatcactatywtatatcatccgggaaaggccaatgtggtggccgatgcattgagtaggaagtcatccagtatgggcaatcttgcttatattccgggcggtgagagaccgcttgctttggatgttcgggatttggccaatcaattcatgaggttggatgtctctgagcccagccatgtgctagcttgcacagccgcttgttcttctttattggagcgtatccgtaatcggcagtatgatgatccccatttgtgtgttccttag

SEQ ID NO: 95 - DNA, 918 bp, Artificial Sequence; identical to SEQ ID NO: 26
  Description of Artificial Sequence: Synthetic polynucleotide

SEQ ID NO: 96 - DNA, 1507 bp, Artificial Sequence
  Description of Artificial Sequence: Synthetic polynucleotide
atggtgaaacaacaagggaaaggctctaaacaaccaggccgaggagaatcctccctgggagggaaacagaaaatggtcaaactcactccccaagctaggcaaaacatcaagaacataaggaaggccataaaagtggctgacaaagacattgacatttcggggagtgagtacgagccatctcgggatatctctttggactcaatcccagaatacatctcgtatccgtagagggccagacatagagacactcttcccctttccccgcagcccaagcatcagtgaacatttcttctaggtcgtctgagggctcaccagcgggtagtagggatgaatactctaccactcccacagcttcattatctgaagagggtgttgtaggagatgaggaagaagtaggtggtgacgatgaagtagaagaaggaggtgaaccacaagtgtggggggggggggattgtgagaactagaaagccgaggtttggcaagataggtttgttagtgaagtggcataccataaattctaggagtggtggccggtgagaaagttgatcccggagcggagtttcattgatagtgacttgctacctcacaaccccaacatgaggagacagtttaggatgagagttggctgggaccatttccttgataagtgtgaggattccaacgaacacttggtcaaagaattttacagcaatgtagcccacatcaaaaagggctccaaagtgaccaaggttcaaaattggaaggtgttgtttgatgggaagtatataaatgaatacctgagcttcaatgagaggacgagaccttatacatggcaaatttggaaatgggagaggaggtttgtccatggctagcacagtacttggcaatcccacgtaccgtccctgactggttggctgctggaatcaaaatattgagaaagagcctgaactttgaagcgaggggatgagagacttttgtttgcagccggttggaccctaccactcatgacaacgcctttcctctccatcgggctgtattggtcacttctattatggtggggtaccccatcaatatggggaatgtgatgtcgaggattattactattgtgggtgccgagcatgatagaaacaatccattccccagcttcctgactgagtacttccgggacctgaaagtggatgagaggccctatgacatcaaggtcaaggagatagccccattttcctggtatagcatgaagggggataacaaccccaagagcaagaactacaaagctcatgcttctgccccaattgtccagtctaaagatccagttatggtagaggtccctgctgagcctacctctactcctgctgacatctctcccggaccttccacatccacagctattcctgctggtctatccacatcagcgggcccggagatcccatcttactgggcccatcatattactacccaccgtctaagccaggcacttctaaatttcaacaactggatgaagactgcctcatctaagttgtccatctag

SEQ ID NO: 97 - DNA, 6603 bp, Artificial Sequence
  Description of Artificial Sequence: Synthetic polynucleotide
atgggtagaattgaaatgatgttcgaacagatgatgaagaaaaatgcagattctgatgcacagttggctttccacaatacctcaatcagaaatttggaggttcagataggccaaatctctcagtccttgaatacacgccctaagggtgctctaccaagtgatatagtagtaaacccaaagggtgagaacaatcatgttatggcagtaactacaaggagtggacgaggcggtgatgtgaatgcctctaaacaaaagcaagttttgagtgatgatattgagttgcaagaagatgaagttcctttggttgtagaaaatgtgatagatgacaatatgaatgaagaagtgatgattgatattcaagatgccgaggtggaaactcaaaatgacgtgaacccgtctagggaacacgtaatagatatgtcggagctggtggtgcctaaagccaaggtaccttttccaagatcacctccgccttatcctcaaagtcttgataagtagaaaattgagaatcagtttaaaaagttcattgacatgatgaagagcttatccattaatgtgcctttggtggaggctcttgagcaaatgccgggctatgcaaaattcatgaaggacttggtgacaaagaagtggtctatggattgtgaaactataaaaatgactaaccaagttagtacaatagtgcaatcaatggtcccgaatcttgaagatcccggtgctttcaccattccttgcaccattgggagtgcggattttgccaaggctctatgtgacttgggggctagtatcaatttgattcctactcggttttcaaaattttgtgtattgggcaacctaggccgacttccatgagattacaaatggcggatagaacgatgaagagatcattggatattatcgatgatgtccttatccgggtggacaaatttatcttgccagctgattttgtgatcttggactgtgaggtggattatgaagttcctatcatattggggagatctttccttgctaccgggaaggccttagttcatgtggaagtaggggacctcacctttcgggtgggtgatgaaaaagtggtctttcatgtttacaagtcaatgaaacagcccaacagtaccaaagtgtgctcttttatggacctcgtcacaatagtgataattgatgacaccagtgtaatgatcaatgtggaggactcattggaggccgtattgttgaatcttgatgtcaatgatgatgagggccgagtggagtgcgtgaatgctttacatgggatgggctcttactcttatgaacctaggaaactatctctggatctcgagaataggaagactccaccaacaaagccttcaattgaggagcctccggtgttggatttgaaaccacttccttcacaccttaggtatgagttcttaggctcaaactctactttgccagttattctttcctcttgtcttactaacatgcatgttgatgccaattagcggtgcttcaaaagtggaaaaaggcaattggatggactttagctgatattcgggggataagccccacattttgtatgcacaagattattctggaagatgatgtaaagccctccttggagcatcaaaggaagttgaaccaggcaatgcaagaagttgtgaaaaaggaggtgatcaggggttatgtaccccacctctgatagctcttggacttcaccggtgcaatgtataccgaagaagggtggcatgaccctggttgcaaattaacaaaatgagttaattcctaccataaccatcactggttggagggtatgcatggactaccacaagttgaataaagtgacccgcaaggatcactttcctttgacttttcttgaccagatgttagaccgacctgctgggcatgccttctactgtttcttgaatggatattctaggtacaaccaaatcttgattgctccagaagatcaagagaagaccacattcacttgtccatatagcacatttttttttctaggatgcctttcggattgtgtaatgcaccggctacattttaacggtgtatgatggccattttcaccgatatggtggaaggcattttggaggtgttcatggactactttagtgttgtgggtgattcatttgatgaatgcttgaagaatcttgatagagttttggcccgttgtgaagaaaccaatcttgttctcaattgggagaaataccactttatggtggaagagggtatagttcttgggcataaaatttcaaagcatggtattgaggtagacaaagcaaaaattgatatgatttcaggtctccctccccctacatctatcaatggagttagaagttttcttggatatgaggggttctaccggagatttatcaaagactttttgaaggtagtgaatcgtttgtgcaagttgttagaaaaagatgccaagttcgtgtttgatgaaaaatgtatgcaagcctttgaacttctcaagcataagttgaccaccactcctatcattaccgcacctaattagagcttgccctttgagctcatgtgtgatgcgagcgacgttgtggttggagcggttttgggtcaacgagtgaacaaaatgtttcatccggtgtactatacgagcaagacaatgcatgatgctcaagtgaactacacggtgactaagcaagagcttttgtctattgtgttcgcaatggaaaaatttcggccgtatctcatgggtgctaaggttattattcataccgatcatgccgcactccgatacttgatgacgaagaaggattccaaagctagactgatgcgatgggtcttgttacttcaagctttgaggaggaggggaggcctcgtgatggcctagaaagcaattattcatttcccgacgaacaactcctttcggtgtcgatgaatggaatgctatagtttgcagatgttgctaatttccttgtgactggtataatcccgtgtgagctctcttctaaccaaaagaagaagctcaagcgagatagtttggatttctattggtatgagacatacttgttcaagatttgcacggatggtgtgatccgaaggtgtgtcccagaggaagagaaattgagtatcttggaggtttgtcattcctctccctatggtggccataatggcggggcgaggacgacttccacagttcttagttgtggattttattggccaactttgtacaaagatgcaagtgaactcgtaaagaggtgtgacgaatgtcaaagagggggcggaatttcgaagaaagatgagatgcctctcaataccatccttgaggtggatatttttgatgtatgaggcattgattttatgggtccgtttgttagctcatgtgggaacacatacatttttgtggcggtggactatgtttcaaagtgggttgaagccgtggcttttcccaactatgaggcgcagagtgttgttgcatttctcaagaagagcagttttacaaggtttggtactcttcgtgcaatcataagtgatggggggtctcatttttgcaatagagcttttgacatttttcttgcaaagtatggtgtcaatcacaaagtttctactccctatcatcctcaagcaagtggtcaagttgaagtctacaacatggaaatcaaaaagatattgtcaacgacggtcaatgcttataggatcgattggtcaaagaagttggatgatgctctatgggcttataagattcttacaagactccgattggtatgtttccatatcggttggtgtttgggaaagcttgccatctaccggttgagttagagcacaaggccatgtgggccttatggaagctaaatcttgaatgggatattgcagccaatctctgtgtggagcagcttaatgaactcgatgaatttcgattccatgcctactccagttcttccttgtacaaggacaagatgaagtaccttcatgataaatatgctcgtagtaaggatttcaaagtgggtgatttggttctcttgttcaactcttggttacgtctgtttccggaaaagcttaagtcgaaatggagtggaccttttgaagtggtatgtgtgatcccgtttggtgcacttgatttaaagaacaaaaatggggaagttttcagagtgaatgggcatagggtcaagcactacttcggcaaaactgatgatagccacatggtggcacttcttcatctcaaatgatttgatggtaacttgcgtcgtgctgcgacgttaaatcagacgctttttgggaggcaacccatgtgtttttcttcttgtttttctttgattttcattgtaatataggatttatttttaggttgaccggttgtgagatgttacatgtttgtgtttatgcagtgcggcatatggtggaaaaattattcaagtctctgaagttttcaatgcggaccacactacattgtgtgcggccgcaaataactcagtgtggggggcacaaaatcagtgcagaccgcattgataaaggatgaaaatactagctctctgaagtttgccaccgcggccgccttgtattttgtgcggtccacggtgcctcaatgcggaccacattaccattttgtgcggtccgtggtgcaattgttcagagagtgggtagtctgaacaccacctctatgcagacagtattagcatttttgtgcggtccgcattggcctctatgcgaccgctttatattttgtgcggtccgcactgtgcaacatctgctactgtctgcatctttttattttctacaattgtgaacttaatttcttctactgatactaacaagtctaatggatgttgtttgcagacaatggtgaaacaagaggcaagggttctaaacaaccaggcaggggagagtcctcccggggagggaaacagaagatgctaagattgactccccaagcccgacaaaacattaaaaacacaaggaagctcactaaagctgctgataggtccattgaccagtctgggagtgaatacgagccctcccgagatatatcttcagactcaatcccagagtacatccctgactggccggagagaaacagactaagagacactcttccacctttccccactgtccaagcgtcagtaaatgtatcttctggttcgtctgagggctcagctgaaggtagtggggatgaatactccacctctcccacaacttcattatccgaagagggtgtagtaggggaagaagaggtagtaggagaagggggtcagccccaggttggtagggtagaacgaactagaaatccggaggtgtggcaagaccactttgtgagtgaggtggcctaccataaattcaaagaatggtggcctgtgaggaaattaatttcggagagaatttttgtagatagaaaccttttgcctcacaaccccaatgtgagaaggcaatttagagatagagtgggctgggagtatttcttaaacaattgtgaggatgcaaacgagcacctagtcaaggaattctacaccaatgttgcccacatcaagaagggcaccaaagtgaccaaggtgtgcaatttgaaagtgttgtttgataggaaaacaataaatgactacttggacttcgatgagaaggatgagtcgctgtatttggaaaagatggaattaggtgaggaggtctgtccttggttggcacagtatctggcaaacccaggtatcacccccgattggttgaatgcgggagtgaaaattttgataagaagtttgaatttcgaggccaaggggtgggaaacatttgtgtgtagcagattggaccccactactcatgaaaactcactccctcttcaccgggcagtattggtagcatcaatcatggtagggtacccaattaacgtcgggaaggtgatgtctcgggtgattacacaggtagttagtgaaggtgatagaactaacccttccctagcttcttgaccatgtactttagggaccgcaaagttgaaaagcggccatttgatatcaaggtaaaagcaaaggccccgttctcatggtataacatacagggtgatgacaacccgaaaggcaagaactacaagggaacatccactgatccaactggcaagtctgaagagccagttgtggtagtggctcctactcatcttgcctccacctcaatggacatccaccctggtccatccattttagcagctctagagataccctctacctcggctcatccagtgactgcacaatgtctaagccagacccttcttagcatcaacagttggatgcagacagcttcctctaagttgtttgccctcactactgcagtagcatctcagtcgacacctccacctctacaggtcctacagtctatgaggatgccctcaaggatattctggacaactagaaaaaaattcttgacactcaaaaatttcttacggacgctgtggagtcatatggaaaagctctcaaagagcttgctagggaggccaagaagatgagaaagacgcgggcttccaaggagtccgtgaaggagttgagggttaaggttgataggatgaaggcagaaagacgctttggatttattgctacaagaccctgtgccaacatctcaccctcagctagagcagtcccagaggcctcccaagaggaagaggatgattccccgagcagatga

SEQ ID NO: 98 - DNA, 1207 bp, Artificial Sequence; identical to SEQ ID NO: 14
  Description of Artificial Sequence: Synthetic polynucleotide

SEQ ID NO: 99 - DNA, 4787 bp, Artificial Sequence; identical to SEQ ID NO: 79
  Description of Artificial Sequence: Synthetic polynucleotide

SEQ ID NO: 100 - DNA, 895 bp, Artificial Sequence; identical to SEQ ID NO: 24
  Description of Artificial Sequence: Synthetic polynucleotide

SEQ ID NO: 101 - DNA, 2421 bp, Artificial Sequence; identical to SEQ ID NO: 48
  Description of Artificial Sequence: Synthetic polynucleotide

SEQ ID NO: 102 - DNA, 2121 bp, Artificial Sequence
  Description of Artificial Sequence: Synthetic polynucleotide
atggcttatcctgcagtgaactctttaattcaaactttggagctattccaaaagacttatccagcattgatccatggtcaaactgcagagatgattgactctctccatgccagtgctgaatattttcaaaatattcttgagaacgctagccaccagaaacaggaatatgatacattcaaatattttgaggcagagataagatcagcgatgcaccaagctgaagatgtgcttgaatcaaatgtgaggcggattaactccttctccactgaaacctatgctcgttgccttggcccccctgatgatgaggatcatttcttcaaaaagggacattctctggtagctggttcttcttcaaaccttgctcctacttcccttctaggtgatgatgatgatgatgatgatacagtcggtttggcgaattccttgagaaaactcactgatgcactacttggattagcttctgagcagaacgtcattcctattttgggaatgggtggatgtggcaataccacacttgctaaaaaggctcaagatgatcaatcaattagatcacattttgacatccaaacgtgggttactatatctcaagaatatcacttaaacgaagtgttgccaagccttgcacgtagccttacaggatacgagtttcagggaatgagtgatgaccagttaatggaccagtcatataaagcacttaagggtcggaagtatcttatcgtagttgatgatatttggagtacaaagatttgggatttgattgcgagaacccttcctgatgacaataatggaagtcgaatcattctgactacgaggctaaaagatgtggctgagtatgctaaccctgatatccctcctcttgaagtgctgccgttaggggtagatgagagttggaagttacttcagaataagttgttggggaaaagccacattaattgtcattctgaattagaagatatcgggaagaaaatagtacaaaaatgccagggactgcctctagcaattttggtggttgctgggcatctctctaggatttccccaaaaagggaaaactgggtaactgtatctgaaaatgtgaatgaagttgttacaagttatccgaatgaatgcatagcagtgcttgcgatcagttaccatcacctgcctattcacctcaaaccttgtttcctccatatgggagcattccctgaggattctgagattgatgcttggcggttaattcgtctgtgggttgcagagggttttctgaagagggataagctgagaagcctggaaaaagtggcagaggattgtttggaagatctggctagcagaaatttaataatggtcaaaagggggaaactcaatggccggatcaaaaatttgcctttgcatacacgcatttcaggggaaaactttaccaagtcagcaaaatttttgcgttgcttgtatcttttcaaggaacctcataaaacaataggaaaaccattggaattcaaagctttgagggtgttggctgccattcctagttttgttcatcacaatctggagtggcgtggaattttaactttacctaaccatatctggaatatgaagcagctgaggcatctccgtctacatggtagcacttatttgcccaacccatatgtggtagacgagttgggtctgcaacatctgcaggagctttccagtctctgtcttgctagctgtacaaaagagagattgaccctatctggaagttggcttccctgggaagacatggcaaatcttgccaagttaccaaatctccaactactcaaacttagatgtcatgcattcagaggtgaggtatggaaattaaaggaggaagatgagttcaagcagctaaagttccttctacttgatgacacagagacacaactctgggaggctaccaatgttaactttccaaatcttcaacgcctcgtattggagaaaatcaagattcttaggcgaattcctatagcctttgcagatacatacaccttggagtcaattgagttgtataaatgcggtctaattgtggattcagccagagaaattcaggaggaagtagctgccatggcgggaagtgattgtcttgctcttcgcatatatatatatgaaggtaacgactttcagaattaa

SEQ ID NO: 103 - DNA, 387 bp, Artificial Sequence
  Description of Artificial Sequence: Synthetic polynucleotide
atgatcgacccaggccaaggtatccttctctcttctgctccctcttttgatcttgtcgctttttgtgatgctgactgggctgcttgtaaagattctcgtcactccgtcagtggtttttttattactcttggaggtgcccctatttcttggaaatcgaagaagcaaatctccatctccttgtcatccgctgaatttgagtatcgatccatgagatgggtgactgctaagatcacttggcttgttcgactccttgctgatttatctactcctccaactttgccggttcctttacactctgacagtctggcggcgattcatatcgcccgcaatcccatcttccacgaacgaactaaacatgtagagttggattgccatttcgttcgatag

SEQ ID NO: 104 - DNA, 462 bp, Artificial Sequence; identical to SEQ ID NO: 89
  Description of Artificial Sequence: Synthetic polynucleotide

SEQ ID NO: 105 - DNA, 816 bp, Artificial Sequence; identical to SEQ ID NO: 40
  Description of Artificial Sequence: Synthetic polynucleotide

SEQ ID NO: 106 - DNA, 1533 bp, Artificial Sequence; identical to SEQ ID NO: 42
  Description of Artificial Sequence: Synthetic polynucleotide

SEQ ID NO: 107 - DNA, 1485 bp, Artificial Sequence; identical to SEQ ID NO: 31
  Description of Artificial Sequence: Synthetic polynucleotide

SEQ ID NO: 108 - DNA, 1239 bp, Artificial Sequence; identical to SEQ ID NO: 37
  Description of Artificial Sequence: Synthetic polynucleotide

SEQ ID NO: 109 - DNA, 930 bp, Artificial Sequence; identical to SEQ ID NO: 43
  Description of Artificial Sequence: Synthetic polynucleotide

SEQ ID NO: 110 - DNA, 918 bp, Artificial Sequence; identical to SEQ ID NO: 26
  Description of Artificial Sequence: Synthetic polynucleotide

SEQ ID NO: 111 - DNA, 1188 bp, Artificial Sequence; identical to SEQ ID NO: 41
  Description of Artificial Sequence: Synthetic polynucleotide

SEQ ID NO: 112 - DNA, 2718 bp, Artificial Sequence; identical to SEQ ID NO: 47
  Description of Artificial Sequence: Synthetic polynucleotide

SEQ ID NO: 113 - DNA, 930 bp, Artificial Sequence; identical to SEQ ID NO: 34
  Description of Artificial Sequence: Synthetic polynucleotide

SEQ ID NO: 114 - DNA, 1470 bp, Artificial Sequence; identical to SEQ ID NO: 45
  Description of Artificial Sequence: Synthetic polynucleotide

SEQ ID NO: 115 - DNA, 654 bp, Artificial Sequence; identical to SEQ ID NO: 44
  Description of Artificial Sequence: Synthetic polynucleotide

SEQ ID NO: 116 - protein, 806 aa, Artificial Sequence; identical to SEQ ID NO: 68
  Description of Artificial Sequence: Synthetic polypeptide

SEQ ID NO: 117 - protein, 706 aa, Artificial Sequence
  Description of Artificial Sequence: Synthetic polypeptide
MAYPAVNSLIQTLELFQKTYPALIHGQTAEMIDSLHASAEYFQNILENASHQKQEYDTFKYFEAEIRSAMHQAEDVLESNVRRINSFSTETYARCLGPPDDEDHFFKKGHSLVAGSSSNLAPTSLLGDDDDDDDTVGLANSLRKLTDALLGLASEQNVIPILGMGGCGNTTLAKKAQDDQSIRSHFDIQTWVTISQEYHLNEVLPSLARSLTGYEFQGMSDDQLMDQSYKALKGRKYLIVVDDIWSTKIWDLIARTLPDDNNGSRIILTTRLKDVAEYANPDIPPLEVLPLGVDESWKLLQNKLLGKSHINCHSELEDIGKKIVQKCQGLPLAILVVAGHLSRISPKRENWVTVSENVNEVVTSYPNECIAVLAISYHHLPIHLKPCFLHMGAFPEDSEIDAWRLIRLWVAEGFLKRDKLRSLEKVAEDCLEDLASRNLIMVKRGKLNGRIKNLPLHTRISGENFTKSAKFLRCLYLFKEPHKTIGKPLEFKALRVLAAIPSFVHHNLEWRGILTLPNHIWNMKQLRHLRLHGSTYLPNPYVVDELGLQHLQELSSLCLASCTKERLTLSGSWLPWEDMANLAKLPNLQLLKLRCHAFRGEVWKLKEEDEFKQLKFLLLDDTETQLWEATNVNFPNLQRLVLEKIKILRRIPIAFADTYTLESIELYKCGLIVDSAREIQEEVAAMAGSDCLALRIYIYEGNDFQN

SEQ ID NO: 118 - protein, 128 aa, Artificial Sequence
  Description of Artificial Sequence: Synthetic polypeptide
MIDPGQGILLSSAPSFDLVAFCDADWAACKDSRHSVSGFFITLGGAPISWKSKKQISISLSSAEFEYRSMRWVTAKITWLVRLLADLSTPPTLPVPLHSDSLAAIHIARNPIFHERTKHVELDCHFVR

SEQ ID NO: 119 - protein, 153 aa, Artificial Sequence
  Description of Artificial Sequence: Synthetic polypeptide
MGLNDVYSQARGNILMMNPLSRIDFSYSLLLQDKNQREIYARSQFNADASSFMVGVQGKAPQKNNNQSQQKSWTNSQKVNNTQQKPKGRKAKFNPNMNYTYCMRIGHVRVDCYRLNGFPDDFQFTISTQVKANAIVKGQDNDNGSTQSNDGTP

SEQ ID NO: 120 - protein, 271 aa, Artificial Sequence; identical to SEQ ID NO: 60
  Description of Artificial Sequence: Synthetic polypeptide

SEQ ID NO: 121 - protein, 510 aa, Artificial Sequence; identical to SEQ ID NO: 62
  Description of Artificial Sequence: Synthetic polypeptide

SEQ ID NO: 122 - protein, 494 aa, Artificial Sequence; identical to SEQ ID NO: 51
  Description of Artificial Sequence: Synthetic polypeptide

SEQ ID NO: 123 - protein, 412 aa, Artificial Sequence; identical to SEQ ID NO: 57
  Description of Artificial Sequence: Synthetic polypeptide

SEQ ID NO: 124 - protein, 309 aa, Artificial Sequence; identical to SEQ ID NO: 63
  Description of Artificial Sequence: Synthetic polypeptide

SEQ ID NO: 125 - protein, 305 aa, Artificial Sequence; identical to SEQ ID NO: 66
  Description of Artificial Sequence: Synthetic polypeptide

SEQ ID NO: 126 - protein, 395 aa, Artificial Sequence; identical to SEQ ID NO: 61
  Description of Artificial Sequence: Synthetic polypeptide

SEQ ID NO: 127 - protein, 905 aa, Artificial Sequence; identical to SEQ ID NO: 67
  Description of Artificial Sequence: Synthetic polypeptide

SEQ ID NO: 128 - protein, 309 aa, Artificial Sequence; identical to SEQ ID NO: 54
  Description of Artificial Sequence: Synthetic polypeptide

SEQ ID NO: 129 - protein, 489 aa, Artificial Sequence; identical to SEQ ID NO: 65
  Description of Artificial Sequence: Synthetic polypeptide

SEQ ID NO: 130 - protein, 217 aa, Artificial Sequence; identical to SEQ ID NO: 64
  Description of Artificial Sequence: Synthetic polypeptide

SEQ ID NO: 131 - DNA, 121 bp, Artificial Sequence
  Description of Artificial Sequence: Synthetic polynucleotide
atcatgtctaattgatttaattgctgtatttgctcaaactgccttatttggactatgtgamacatgctaggttagaaatatatgttttaacttggtgtgaaatttaatttaattgagtatt

SEQ ID NO: 132 - DNA, 121 bp, Artificial Sequence
  Description of Artificial Sequence: Synthetic polynucleotide
gcggctgtataccattttgtacggaccgcagtgggctcaccgtggcctcaatcgagtttgygcggttcataaagatgggggttcagagagttgggagtttagagattaagaccaatacggt

SEQ ID NO: 133 - DNA, 121 bp, Artificial Sequence
  Description of Artificial Sequence: Synthetic polynucleotide
ggaagcactcaagcatccactcttggaggtggtgggggagggtctggaatattatcattgkcctggtggcttctcctttgtctttgaggtacaataggaacctcatcatcaatattgtcat

SEQ ID NO: 134 - DNA, 121 bp, Artificial Sequence
  Description of Artificial Sequence: Synthetic polynucleotide
acgaaggataaagtgtttgggtagcagaacaaaatgccttcgtcattccagtctttaacayatgccaagtgcaaacaatacaatttaaatttgtagtctcttctgatggtgttggacttac

SEQ ID NO: 135 - DNA, 121 bp, Artificial Sequence
  Description of Artificial Sequence: Synthetic polynucleotide
acaccttcttccgggttaacagaattccatactcggatttctggttcgcagactgtaatayggagtcaatcttttcctcgatttgggatttgaaccggtgatttgggaaatcataattatc

SEQ ID NO: 136 - DNA, 121 bp, Artificial Sequence
  Description of Artificial Sequence: Synthetic polynucleotide
tagctaacaaggaattggatcaattgagagattgattaacccaattaaagagtttaacctrgagatagtaacaacatgacttgagctcttatcaacagttttggttgataccttttggtct

SEQ ID NO: 137 - DNA, 121 bp, Artificial Sequence
  Description of Artificial Sequence: Synthetic polynucleotide
ttacataaatataaaggtttaattgaaagttatactttttggtcaaacacaaataccgtaycaaaatagttcgatacggttaggtattttcttgtttggttcggtacggcttcgatattat

SEQ ID NO: 138 - DNA, 121 bp, Artificial Sequence
  Description of Artificial Sequence: Synthetic polynucleotide
gaaaataccgaccgaaaacggtcgaaaataacatattttttaattattccaaccgacttcrgtcggtttgttaagatttaaaaagaaatgcaaaattatcacataattatatttccgaccg

SEQ ID NO: 139 - DNA, 121 bp, Artificial Sequence
  Description of Artificial Sequence: Synthetic polynucleotide
gtctgcacttttcttattgcttattgtttacccgaaaaatggatagagttgaatttatacrtagttttaagggtatgtggtataatttaatacaaatcgtaagaataagtagaaatatcaa

SEQ ID NO: 140 - DNA, 120 bp, Artificial Sequence
  Description of Artificial Sequence: Synthetic polynucleotide
taggattttgaccgtggttgggaactatgtgaagacaactccggaatagagttatgtcgrttctgttagctccattagatgattttggacttaggggcgtgtccggattatgttttggag

SEQ ID NO: 141 - DNA, 121 bp, Artificial Sequence
  Description of Artificial Sequence: Synthetic polynucleotide
gtcccttacgaatttgtcttcaaattgatacttctccttgctaaaacaccacgatccttarccacaactcaccccacgaaccctagcatagaaccacaacaccctacggcccttaagaaac

SEQ ID NO: 142 - DNA, 121 bp, Artificial Sequence
  Description of Artificial Sequence: Synthetic polynucleotide
gcctcccagcttagcaagagttcatccggcatttcatttttcgatgctacaaaggtatcayggcaatccgtctcatgtgttggatttcagctcagtccagttggacaaggatctatcttat

SEQ ID NO: 143 - DNA, 121 bp, Artificial Sequence
  Description of Artificial Sequence: Synthetic polynucleotide
ccaaattatttttgactgtttgaccaaaatagcgaccaacgttggtcgccatttttgatcrtttgaccaaaatggcgaccaactttggtcgctatatttgaaaataaataaataaaataat

SEQ ID NO: 144 - DNA, 122 bp, Artificial Sequence
  Description of Artificial Sequence: Synthetic polynucleotide
  misc_feature (62)..(62): May or may not be present
ttgtttctcaagaaaatcagcatcgatctttttctttattataaaggtaatatagatgcttggggtattaaaagaggacaaaatattctggcatcatttgagatttgctgagtgcaataaca

SEQ ID NO: 145 - DNA, 840 bp, Artificial Sequence
  Description of Artificial Sequence: Synthetic polynucleotide
atggaagatcatcatcttcatcttgaattctccatttatagttcttcttcttcttcttcttcttctataacttcctcctcatttgcaaattcttctaatggcttaaattctccttcaaccaccacttcttctacttcatcatcttctttccatgagaacattaatgcaaaaaccccatcaaatggctatacttgcaaatccaagaaaagctcaaaaatagttcaagatttcaccaaaaatgggaatggtcatgggaatggggagaacaagaaaaaaagaaagaatcaaggtgatgaaaagcatccaacttttagaggagttcgtaagaggaattggggtaaatgggtgtccgaaattagacaaccaaggaaaaaatcaagaatatggctagggacttatccaacggctgaaatggcggctcgagctcatgatgtcgcagctttagccattaaaggtaactcggcttatcttaatttccctcatttagccgatcaactcccacgaccagcctccacttcccctaaggacatccaagcagcagccgctaatgcggccactagtacgtttctcgagaaaaattccgtcagagatgaagttgagtcccaaattaaactgcacagttcacattcatcgatgaatttagccttagagaacacacaagaattgctaaattctccatcgatagaccacgatgacacattttttgatctacctgatcttaccatcgatcaagtggaccaaaatgaccgttatcaatacccaatctcaacgtggcagctggctggagccgatagcggaatatttcggctcgaggagccatttttgtgggagtgctattag

SEQ ID NO: 146 - DNA, 840 bp, Artificial Sequence; identical to SEQ ID NO: 145
  Description of Artificial Sequence: Synthetic polynucleotide

SEQ ID NO: 147 - protein, 279 aa, Artificial Sequence
  Description of Artificial Sequence: Synthetic polypeptide
MEDHHLHLEFSIYSSSSSSSSSITSSSFANSSNGLNSPSTTTSSTSSSSFHENINAKTPSNGYTCKSKKSSKIVQDFTKNGNGHGNGENKKKRKNQGDEKHPTFRGVRKRNWGKWVSEIRQPRKKSRIWLGTYPTAEMAARAHDVAALAIKGNSAYLNFPHLADQLPRPASTSPKDIQAAAANAATSTFLEKNSVRDEVESQIKLHSSHSSMNLALENTQELLNSPSIDHDDTFFDLPDLTIDQVDQNDRYQYPISTWQLAGADSGIFRLEEPFLWECY

SEQ ID NO: 148 - DNA, 2828 bp, Artificial Sequence
  LARi1_c2, target gene is NDG1
  misc_feature (1)..(100): Gateway cloning site sequence
  misc_feature (2729)..(2828): Gateway cloning site sequence
caaataatgattttattttgactgatagtgacctgttcgttgcaacacattgatgagcaatgcttttttataatgccaactttgtacaaaaaagcaggctttgataagtttgtaattgaggcaaagcttcacaaggacaaaggggtaggcaggtttgtggacattgcgcattataaaagagtgaaagatgtagcccttgagattaaaggtatcagagatagggtgaaagaaatccgtctgaacaatgcacatggccttcaagctcttcaagatgatgatccatccaacagaggcgtggaagacagaaaggcctcccgtggttgaggaagatgatgtggtgggctttgatgaggaggcacagaaggtaatcgaccgtcttcttgacagatcagatgaattagaggttattccagttgtaggaatgcctggtcttggcaaaaccacactagcaactaagattttcaagcatcggaaggttgaatacgagttctttactcgagtttgggtttatgtctcgcaatcatacaagacaagagaattatatctcaacatcattagcaaattcaccggaaaaacaaaacaataccaatatatgtgtgggaacgtatcaagattgctttcccgaacaacaaaaagtgcaatagagtattgttgaccactcgagatcacaaggtggctcatcattgcaacaatactccacatgatttaaaatttcttagcgatgaggaaagttggatgttgctagagaagaaagtttttcacaaggctaaatgtcctccggaattggaaagacctggacagagcatagccaggaagtgtaagggacttccccttgcaattgtggtgattgcaggagctctaatagggaaacgcaagacaacaagggagtgggagcaagtggatcagagtgttggtgaacacctcattaatagaaaccagccaaagaattgtaataaaattggtgcaaatgagttatgatcgtttgccttacgacttgaaagcatgctttttgtattgtggtgcatttcccagaggctttgagatccctgcttggaatttgatccgtttatggatcgccgaaggcttcatccaattcaatcattcattttttgcccttaatttgcgccgaacccgctcggaacactttagctccgcccctgcctgccatgtttgttgttggtatcatgtaaaattttagcatgtaactcaacaccacaagtcaatgagacaacgaatgcagtaacccagctagggctatgcatcagtcgggtcggatcggatcagatcgaatttaacacatttcgaattgtaaattcggattccgatttttataaaatgcaatccgaatccaatccaaattaaattggatcggattggattttaaagtttgaatcgggtaaatatttcggattttcgaatcagatagtatgccttattaaggctactaacaatctaatcggctactacactttataaggcttaaattgaaaggcaacaaatgtcttttatagcaatagacaaaacaaagctccatagcaaaataaaataaactaaaattccaaacaaatgttatctcggctgggaatcaagccccaactcagagctgtgggccaggttgctttgctttatcggatcaatcagtatgcggtgggcaagctctttcccaagtcgctgagctgtttaacagagggaaggaaaaagaaatgacaaaacaaaaactacaaaggaaaaagaattggatgaagccttcggcgatccataaacggatcaaattccaagcagggatctcaaagcctctgggaaatgcaccacaatacaaaaagcatgctttcaagtcgtaaggcaaacgatcataactcatttgcaccaattttattacaattctttggctggtttctattaatgaggtgttcaccaacactctgatccacttgctcccactcccttgttgtcttgcgtttccctattagagctcctgcaatcaccacaattgcaaggggaagtcccttacacttcctggctatgctctgtccaggtctttccaattccggaggacatttagccttgtgaaaaactttcttctctagcaacatccaactttcctcatcgctaagaaattttaaatcatgtggagtattgttgcaatgatgagccaccttgtgatctcgagtggtcaacaatactctattgcactttttgttgttcgggaaagcaatcttgatacgttcccacacatatattggtattgttttgtttttccggtgaatttgctaatgatgttgagatataattctcttgtcttgtatgattgcgagacataaacccaaactcgagtaaagaactcgtattcaaccttccgatgcttgaaaatcttagttgctagtgtggttttgccaagaccaggcattcctacaactggaataacctctaattcatctgatctgtcaagaagacggtcgattaccttctgtgcctcctcatcaaagcccaccacatcatcttcctcaaccacgggaggcctttctgtcttccacgcctctgttggatggatcatcatcttgaagagcttgaaggccatgtgcattgttcagacggatttctttcaccctatctctgatacctttaatctcaagggctacatctttcactcttttataatgcgcaatgtccacaaacctgcctacccctttgtccttgtgaagctttgcctcaattacaaacttatcaaacccagctttcttgtacaaagttggcattataagaaagcattgcttatcaatttgttgcaacgaacaggtcactatcagtcaaaataaaatcattatttg

SEQ ID NO: 149 - DNA, 2804 bp, Artificial Sequence
  LARi1_c3, target gene is NDG1
  misc_feature (1)..(100): Gateway cloning site sequence
  misc_feature (2705)..(2804): Gateway cloning site sequence
caaataatgattttattttgactgatagtgacctgttcgttgcaacacattgatgagcaatgcttttttataatgccaactttgtacaaaaaagcaggctaacacctcattaatagaaaccagccaaagaattgtaataaaattggtgcaaatgagttatgatcgtttgccttacgacttgaaagcatgctttttgtattgtggtgcatttcccagaggctttgagatccctgcttggaatttgatccgtttatggatcgccgaaggcttcatccaatacaaagggcccttatcccttgaacgtaaagcagaggattacttgaatgatctcgtcaacagaaacttagtgatgataattcaaaggacgtctgatggacaaatcaaaacatgtcgtgttcatgacatgttgcatgagttttgctggcaagaggccacaacagaagaaaatcttttccaagaggtaaaattaggtgttgggcaatttgctcgtgagatacagcaactatccacctaccgccgcttgtgcattcattcctcagttctggaattcatttctatgaagccctctggtgagcatgttaggtcattcctatgtttttcttcagaaaaaattgacatgcccccggttgacatcccaaacataccaaaagactttccattgctaagggtgttggatgctgaatccatcaaattcagttgcttttgcagggagtttttccaattgtattttctgaggtatattgctttctcatctgactttatcaagatccttcctaaacatattggggaactatggaacgtacaaaccctcattgttaacacacaacagagcaatcttgatattcaagcagacatatggaacatgccacggctgaggcatctgcacactaacacgtccgctaaattgcctacgcctgttgccccaaaaagtagcaaggttacctcggtaaatcaatgcctacaaactctctccacaattgcaccagaaagctgcacagaagaagttttttcaagggctccaaacttgaaaaaactgggcattcgtggtaaaatctttatgcttctggaaccaaataagtccttcaatcattcattttttgcccttaatttgcgccgaacccgctcggaacactttagctccgcccctgcctgccatgtttgttgttggtatcatgtaaaattttagcatgtaactcaacaccacaagtcaatgagacaacgaatgcagtaacccagctagggctatgcatcagtcgggtcggatcggatcagatcgaatttaacacatttcgaattgtaaattcggattccgatttttataaaatgcaatccgaatccaatccaaattaaattggatcggattggattttaaagtttgaatcgggtaaatatttcggattttcgaatcagatagtatgccttattaaggctactaacaatctaatcggctactacactttataaggcttaaattgaaaggcaacaaatgtcttttatagcaatagacaaaacaaagctccatagcaaaataaaataaactaaaattccaaacaaatgttatctcggctgggaatcaagccccaactcagagctgtgggccaggttgctttgctttatcggatcaatcagtatgcggtgggcaagctctttcccaagtcgctgagctgtttaacagagggaaggaaaaagaaatgacaaaacaaaaactacaaaggaaaaagaaggacttatttggttccagaagcataaagattttaccacgaatgcccagttttttcaagtttggagcccttgaaaaaacttcttctgtgcagctttctggtgcaattgtggagagagtttgtaggcattgatttaccgaggtaaccttgctactttttggggcaacaggcgtaggcaatttagcggacgtgttagtgtgcagatgcctcagccgtggcatgttccatatgtctgcttgaatatcaagattgctctgttgtgtgttaacaatgagggtttgtacgttccatagttccccaatatgtttaggaaggatcttgataaagtcagatgagaaagcaatatacctcagaaaatacaattggaaaaactccctgcaaaagcaactgaatttgatggattcagcatccaacacccttagcaatggaaagtcttttggtatgtttgggatgtcaaccgggggcatgtcaattttttctgaagaaaaacataggaatgacctaacatgctcaccagagggcttcatagaaatgaattccagaactgaggaatgaatgcacaagcggcggtaggtggatagttgctgtatctcacgagcaaattgcccaacacctaattttacctcttggaaaagattttcttctgttgtggcctcttgccagcaaaactcatgcaacatgtcatgaacacgacatgttttgatttgtccatcagacgtcctttgaattatcatcactaagtttctgttgacgagatcattcaagtaatcctctgctttacgttcaagggataagggccctttgtattggatgaagccttcggcgatccataaacggatcaaattccaagcagggatctcaaagcctctgggaaatgcaccacaatacaaaaagcatgctttcaagtcgtaaggcaaacgatcataactcatttgcaccaattttattacaattctttggctggtttctattaatgaggtgttacccagctttcttgtacaaagttggcattataagaaagcattgcttatcaatttgttgcaacgaacaggtcactatcagtcaaaataaaatcattatttg

SEQ ID NO: 150 - DNA, 2828 bp, Artificial Sequence
  LARi2_c2, target gene is NDG2
  misc_feature (1)..(100): Gateway cloning site sequence
  misc_feature (2729)..(2828): Gateway cloning site sequence
caaataatgattttattttgactgatagtgacctgttcgttgcaacacattgatgagcaatgcttttttataatgccaactttgtacaaaaaagcaggctggtgaggcggattaactccttctccactgaaacctatgctcgttgccttggcccccctgatgatgaggatcatttcttcaaaaagggacattctctggtagctggttcttcttcaaaccttgctcctacttcccttctaggtgatgatgatgatgatgatgatacagtcggtttggcgaattccttgagaaaactcactgatgcactacttggattagcttctgagcagaacgtcattcctattttgggaatgggtggatgtggcaataccacacttgctaaaaaggctcaagatgatcaatcaattagatcacattttgacatccaaacgtgggttactatatctcaagaatatcacttaaacgaagtgttgccaagccttgcacgtagccttacaggatacgagtttcagggaatgagtgatgaccagttaatggaccagtcatataaagcacttaagggtcggaagtatcttatcgtagttgatgatatttggagtacaaagatttgggatttgattgcgagaacccttcctgatgacaataatggaagtcgaatcattctgactacgaggctaaaagatgtggctgagtatgctaaccctgatatccctcctcttgaagtgctgccgttaggggtagatgagagttggaagttacttcagaataagttgttggggaaaagccacattaattgtcattctgaattagaagatatcgggaagaaaatagtacaaaaatgccagggactgcctctagcaattttggtggttgctgggcatctctctaggatttccccaaaaagggaaaactgggtaactgtatctgaaaatgtgaatgaagttgttacaagttatccgaatgaatgcatagcagtgcttgcgatcagttaccatcacctgcctattcacctcaaaccttgtttcctccatatgggagcattccctgaggattctgagattgatgcttggcggttaattcgtctgtgggttgcttcaatcattcattttttgcccttaatttgcgccgaacccgctcggaacactttagctccgcccctgcctgccatgtttgttgttggtatcatgtaaaattttagcatgtaactcaacaccacaagtcaatgagacaacgaatgcagtaacccagctagggctatgcatcagtcgggtcggatcggatcagatcgaatttaacacatttcgaattgtaaattcggattccgatttttataaaatgcaatccgaatccaatccaaattaaattggatcggattggattttaaagtttgaatcgggtaaatatttcggattttcgaatcagatagtatgccttattaaggctactaacaatctaatcggctactacactttataaggcttaaattgaaaggcaacaaatgtcttttatagcaatagacaaaacaaagctccatagcaaaataaaataaactaaaattccaaacaaatgttatctcggctgggaatcaagccccaactcagagctgtgggccaggttgctttgctttatcggatcaatcagtatgcggtgggcaagctctttcccaagtcgctgagctgtttaacagagggaaggaaaaagaaatgacaaaacaaaaactacaaaggaaaaagaagcaacccacagacgaattaaccgccaagcatcaatctcagaatcctcagggaatgctcccatatggaggaaacaaggtttgaggtgaataggcaggtgatggtaactgatcgcaagcactgctatgcattcattcggataacttgtaacaacttcattcacattttcagatacagttacccagttttccctttttggggaaatcctagagagatgcccagcaaccaccaaaattgctagaggcagtccctggcatttttgtactattttcttcccgatatcttctaattcagaatgacaattaatgtggcttttccccaacaacttattctgaagtaacttccaactctcatctacccctaacggcagcacttcaagaggagggatatcagggttagcatactcagccacatcttttagcctcgtagtcagaatgattcgacttccattattgtcatcaggaagggttctcgcaatcaaatcccaaatctttgtactccaaatatcatcaactacgataagatacttccgacccttaagtgctttatatgactggtccattaactggtcatcactcattccctgaaactcgtatcctgtaaggctacgtgcaaggcttggcaacacttcgtttaagtgatattcttgagatatagtaacccacgtttggatgtcaaaatgtgatctaattgattgatcatcttgagcctttttagcaagtgtggtattgccacatccacccattcccaaaataggaatgacgttctgctcagaagctaatccaagtagtgcatcagtgagttttctcaaggaattcgccaaaccgactgtatcatcatcatcatcatcatcacctagaagggaagtaggagcaaggtttgaagaagaaccagctaccagagaatgtccctttttgaagaaatgatcctcatcatcaggggggccaaggcaacgagcataggtttcagtggagaaggagttaatccgcctcaccacccagctttcttgtacaaagttggcattataagaaagcattgcttatcaatttgttgcaacgaacaggtcactatcagtcaaaataaaatcattatttg

SEQ ID NO: 151 - DNA, 2828 bp, Artificial Sequence
  LARi2_c3, target gene is NDG2
  misc_feature (1)..(100): Gateway cloning site sequence
  misc_feature (2729)..(2828): Gateway cloning site sequence
caaataatgattttattttgactgatagtgacctgttcgttgcaacacattgatgagcaatgcttttttataatgccaactttgtacaaaaaagcaggcttttgcatacacgcatttcaggggaaaactttaccaagtcagcaaaatttttgcgttgcttgtatcttttcaaggaacctcataaaacaataggaaaaccattggaattcaaagctttgagggtgttggctgccattcctaggtatcatttcatcttcaggcgtcgcatgaccttagattcagctatcttgagattcacatagacaatcattttactgaatcacttgaatatatgcataacctgcaaacctttagttttgttcatcacaatctggagtggcgtggaattttaactttacctaaccatatctggaatatgaagcagctgaggcatctccgtctacatggtagcacttatttgcccaacccatatgtggtagacgagttgggtctgcaacatctgcaggagctttccagtctctgtcttgctagctgtacaaaagaggtatttcttggccttcctcatctaaagaaattacgtatctatgatatcggggaaaaatacaaagcattagaggaaacatgttggagcctgctctacttgaataaactccgagtattagagtgttcctttgatgaagggaactctctctggctaaatgttgtttcccaatatcgctaaagagattgaccctatctggaagttggcttccctgggaagacatggcaaatcttgccaagttaccaaatctccaactactcaaacttagatgtcatgcattcagaggtgaggtatggaaattaaaggaggaagatgagttcaagcagctaaagttccttctacttgatgacacagagacacaactctgggaggctaccaatgttaactttccaaatcttcaacgcctcgtattggagaaaatcaagattcttaggcgaattcctatagcctttgcagatacatacaccttggagtcaattgagttgtataaatgcggtctaattgtggattcagccagagaaattcaggaggaagtagctgccatggcgggaattcaatcattcattttttgcccttaatttgcgccgaacccgctcggaacactttagctccgcccctgcctgccatgtttgttgttggtatcatgtaaaattttagcatgtaactcaacaccacaagtcaatgagacaacgaatgcagtaacccagctagggctatgcatcagtcgggtcggatcggatcagatcgaatttaacacatttcgaattgtaaattcggattccgatttttataaaatgcaatccgaatccaatccaaattaaattggatcggattggattttaaagtttgaatcgggtaaatatttcggattttcgaatcagatagtatgccttattaaggctactaacaatctaatcggctactacactttataaggcttaaattgaaaggcaacaaatgtcttttatagcaatagacaaaacaaagctccatagcaaaataaaataaactaaaattccaaacaaatgttatctcggctgggaatcaagccccaactcagagctgtgggccaggttgctttgctttatcggatcaatcagtatgcggtgggcaagctctttcccaagtcgctgagctgtttaacagagggaaggaaaaagaaatgacaaaacaaaaactacaaaggaaaaagaattcccgccatggcagctacttcctcctgaatttctctggctgaatccacaattagaccgcatttatacaactcaattgactccaaggtgtatgtatctgcaaaggctataggaattcgcctaagaatcttgattttctccaatacgaggcgttgaagatttggaaagttaacattggtagcctcccagagttgtgtctctgtgtcatcaagtagaaggaactttagctgcttgaactcatcttcctcctttaatttccatacctcacctctgaatgcatgacatctaagtttgagtagttggagatttggtaacttggcaagatttgccatgtcttcccagggaagccaacttccagatagggtcaatctctttagcgatattgggaaacaacatttagccagagagagttcccttcatcaaaggaacactctaatactcggagtttattcaagtagagcaggctccaacatgtttcctctaatgctttgtatttttccccgatatcatagatacgtaatttctttagatgaggaaggccaagaaatacctcttttgtacagctagcaagacagagactggaaagctcctgcagatgttgcagacccaactcgtctaccacatatgggttgggcaaataagtgctaccatgtagacggagatgcctcagctgcttcatattccagatatggttaggtaaagttaaaattccacgccactccagattgtgatgaacaaaactaaaggtttgcaggttatgcatatattcaagtgattcagtaaaatgattgtctatgtgaatctcaagatagctgaatctaaggtcatgcgacgcctgaagatgaaatgatacctaggaatggcagccaacaccctcaaagctttgaattccaatggttttcctattgttttatgaggttccttgaaaagatacaagcaacgcaaaaattttgctgacttggtaaagttttcccctgaaatgcgtgtatgcaaaacccagctttcttgtacaaagttggcattataagaaagcattgcttatcaatttgttgcaacgaacaggtcactatcagtcaaaataaaatcattatttg

SEQ ID NO: 152 - DNA, 1013 bp, Artificial Sequence
  LARi3_c1, target gene is NDG3
  misc_feature (1)..(100): Gateway cloning site sequence
  misc_feature (914)..(1013): Gateway cloning site sequence
caaataatgattttattttgactgatagtgacctgttcgttgcaacacattgatgagcaatgcttttttataatgccaactttgtacaaaaaagcaggctttgtcgctttttgtgatgctgactgggctgcttgtaaagattctcgtcactccgtcagtggtttttttattactcttggaggtgcccctatttcttggaaatcgaagaagcaaatctccatctccttgtcatccgctgaatttgagtatcgatccatgagatgggtgactgctaagatcacttggcttgttcgactccttgctgatttatctactcctccaactttgccggttcctttacactctgacagtctggcggcgattcatatcgcccgcaatcccatcttccacgaacgaactaaacatgtagagttggattgccatttcgttctaataagatcttcaacacctacaccatttttttaatcactactacccattgcattgaacaaacttccaagttcttcttagcttcagattaagaaagtaccctttcttggctttgttgatgtggtaccattgtccattgtcttgtgtgtttccagaacgaaatggcaatccaactctacatgtttagttcgttcgtggaagatgggattgcgggcgatatgaatcgccgccagactgtcagagtgtaaaggaaccggcaaagttggaggagtagataaatcagcaaggagtcgaacaagccaagtgatcttagcagtcacccatctcatggatcgatactcaaattcagcggatgacaaggagatggagatttgcttcttcgatttccaagaaataggggcacctccaagagtaataaaaaaaccactgacggagtgacgagaatctttacaagcagcccagtcagcatcacaaaaagcgacaaacccagctttcttgtacaaagttggcattataagaaagcattgcttatcaatttgttgcaacgaacaggtcactatcagtcaaaataaaatcattatttg

SEQ ID NO: 153 - DNA, 1163 bp, Artificial Sequence
  LARi4_c1, target gene is NDG4
  misc_feature (1)..(100): Gateway cloning site sequence
  misc_feature (1064)..(1163): Gateway cloning site sequence
caaataatgattttattttgactgatagtgacctgttcgttgcaacacattgatgagcaatgcttttttataatgccaactttgtacaaaaaagcaggctccattgtctagaatagatttttcttattcacttcttctacaagataaaaatcaaagggagatatatgcaagatcacagttcaatgctgatgcttcctcattcatggtaggagttcaaggtaaggctccacagaaaaacaacaatcagtcacaacaaaagtcatggactaattcacaaaaggttaataacacacagcagaaacctaagggaaggaaagcaaaatttaatcctaatatgaactatacatattgcatgagaattgggcatgtcagggtagattgttataggctaaatgggtttccagatgatttccaattcaccatatcaacacaggtcaaggctaatgctatagttaaaggacaagacaatgacaatggaagcactcaaagcaatgatggaacaccttaataagatcttcaacacctacaccatttttttaatcactactacccattgcattgaacaaacttccaagttcttcttagcttcagattaagaaagtaccctttcttggctttgttgatgtggtaccattgtccattgtcttgtgtgtttccaaggtgttccatcattgctttgagtgcttccattgtcattgtcttgtcctttaactatagcattagccttgacctgtgttgatatggtgaattggaaatcatctggaaacccatttagcctataacaatctaccctgacatgcccaattctcatgcaatatgtatagttcatattaggattaaattttgctttccttcccttaggtttctgctgtgtgttattaaccttttgtgaattagtccatgacttttgttgtgactgattgttgtttttctgtggagccttaccttgaactcctaccatgaatgaggaagcatcagcattgaactgtgatcttgcatatatctccctttgatttttatcttgtagaagaagtgaataagaaaaatctattctagacaatggacccagctttcttgtacaaagttggcattataagaaagcattgcttatcaatttgttgcaacgaacaggtcactatcagtcaaaataaaatcattatttg

SEQ ID NO: 154 - DNA, 2474 bp, Artificial Sequence
  LARi5_c1, target gene is NDG5
  misc_feature (1)..(100): Gateway cloning site sequence
  misc_feature (2375)..(2474): Gateway cloning site sequence
caaataatgattttattttgactgatagtgacctgttcgttgcaacacattgatgagcaatgcttttttataatgccaactttgtacaaaaaagcaggctatggaaatcgacttgaacattcaagagttgctagtgatcgatgattcagatttgcttatgcaccaggtacaaggagagtgggccaccaagaattccaagatattgccatatctgcaccatgtgcaggaattaagaaagaggttcatgaagatagaatttcgacatgtgcccagaattcagaatgagtttgtcgatgcagtagccaccttgtcatctatgatacaacatccatataaaaattatattgatcccatcccagtgaagatccataatcagtcggcatattgcgctcatgttgaagaagaaatagatggaaagccttggttccatgacatcaagaagtatttgtcaaagggagaatatcttgagcacgcaaaccacactcagaaatgcacactccagagattttacaatcacttcttccacggcggaggaaatttgtacaggagaactcctgatttgggtttcctaagatgtgtcgatgcaaaggaagcttctaagctacttgaggatgtacatgccgggacttgtggcctgcacatgaatggtttcgtcttggctaagaagatacttagggtcggttacttttggatgaccatggaaacggattgcatccatgtgccaaggccaaatttatcagaacataatgtccagagctttcaactaaagggtcaaactaaggcaatttacaccagggtgctgacaggaggagcacccatacttgcaaaaattgatggagcaatttggccaaaaccaattaattcagacgcaatcaagagatacgatgcttggattatttacatttttctcatctaattcaatcattcattttttgcccttaatttgcgccgaacccgctcggaacactttagctccgcccctgcctgccatgtttgttgttggtatcatgtaaaattttagcatgtaactcaacaccacaagtcaatgagacaacgaatgcagtaacccagctagggctatgcatcagtcgggtcggatcggatcagatcgaatttaacacatttcgaattgtaaattcggattccgatttttataaaatgcaatccgaatccaatccaaattaaattggatcggattggattttaaagtttgaatcgggtaaatatttcggattttcgaatcagatagtatgccttattaaggctactaacaatctaatcggctactacactttataaggcttaaattgaaaggcaacaaatgtcttttatagcaatagacaaaacaaagctccatagcaaaataaaataaactaaaattccaaacaaatgttatctcggctgggaatcaagccccaactcagagctgtgggccaggttgctttgctttatcggatcaatcagtatgcggtgggcaagctctttcccaagtcgctgagctgtttaacagagggaaggaaaaagaaatgacaaaacaaaaactacaaaggaaaaagaattagatgagaaaaatgtaaataatccaagcatcgtatctcttgattgcgtctgaattaattggttttggccaaattgctccatcaatttttgcaagtatgggtgctcctcctgtcagcaccctggtgtaaattgccttagtttgaccctttagttgaaagctctggacattatgttctgataaatttggccttggcacatggatgcaatccgtttccatggtcatccaaaagtaaccgaccctaagtatcttcttagccaagacgaaaccattcatgtgcaggccacaagtcccggcatgtacatcctcaagtagcttagaagcttcctttgcatcgacacatcttaggaaacccaaatcaggagttctcctgtacaaatttcctccgccgtggaagaagtgattgtaaaatctctggagtgtgcatttctgagtgtggtttgcgtgctcaagatattctccctttgacaaatacttcttgatgtcatggaaccaaggctttccatctatttcttcttcaacatgagcgcaatatgccgactgattatggatcttcactgggatgggatcaatataatttttatatggatgttgtatcatagatgacaaggtggctactgcatcgacaaactcattctgaattctgggcacatgtcgaaattctatcttcatgaacctctttcttaattcctgcacatggtgcagatatggcaatatcttggaattcttggtggcccactctccttgtacctggtgcataagcaaatctgaatcatcgatcactagcaactcttgaatgttcaagtcgatttccatacccagctttcttgtacaaagttggcattataagaaagcattgcttatcaatttgttgcaacgaacaggtcactatcagtcaaaataaaatcattatttg

SEQ ID NO: 155 - DNA, 1175 bp, Artificial Sequence
  LARi6_c1, target gene is NDG6
  misc_feature (1)..(100): Gateway cloning site sequence
  misc_feature (1076)..(1175): Gateway cloning site sequence
caaataatgattttattttgactgatagtgacctgttcgttgcaacacattgatgagcaatgcttttttataatgccaactttgtacaaaaaagcaggctactgggaatagctgaggaaattcatcggttgaaggccatgaatgttatcctggaagatcagcaagcccaaggggttcccatgtcgaatgatgaagtggcttgtttgacacaggagaatgctaatctcagggcgcaagttgagaacttgaaggcggaactgctcaacgagcaaaagtcggcaaacaccttaatagacctcgttctccaggcattttctgctgctaccaatccttttactcctagtgccctaaagtacccctttagtgaccagttttctggatatgtttcttatgtttttgtttcattgttgatgagtcaattggacacaactagaaatgaagtgactggcgtcactgtttctgccgtactgcactgtcctcccactcattctctaacaaaacaaagtactcataataagatcttcaacacctacaccatttttttaatcactactacccattgcattgaacaaacttccaagttcttcttagcttcagattaagaaagtaccctttcttggctttgttgatgtggtaccattgtccattgtcttgtgtgtttccatgagtactttgttttgttagagaatgagtgggaggacagtgcagtacggcagaaacagtgacgccagtcacttcatttctagttgtgtccaattgactcatcaacaatgaaacaaaaacataagaaacatatccagaaaactggtcactaaaggggtactttagggcactaggagtaaaaggattggtagcagcagaaaatgcctggagaacgaggtctattaaggtgtttgccgacttttgctcgttgagcagttccgccttcaagttctcaacttgcgccctgagattagcattctcctgtgtcaaacaagccacttcatcattcgacatgggaaccccttgggcttgctgatcttccaggataacattcatggccttcaaccgatgaatttcctcagctattcccagtacccagctttcttgtacaaagttggcattataagaaagcattgcttatcaatttgttgcaacgaacaggtcactatcagtcaaaataaaatcattatttg

SEQ ID NO: 156 - DNA, 2000 bp, Artificial Sequence
  LARi7_c1, target gene is NDG7
  misc_feature (1)..(100): Gateway cloning site sequence
  misc_feature (1901)..(2000): Gateway cloning site sequence
caaataatgattttattttgactgatagtgacctgttcgttgcaacacattgatgagcaatgcttttttataatgccaactttgtacaaaaaagcaggcttaactttggtgggcctaactcaggtcccagagggttttattgccaccctagttcttcaggacgccctggttcaattggtgggccttatggagagagtcacccgaatatgttttcttcctgtagcaccagccacttctctggctggaggaggggctcagactccttctacacgcactccggagttcaccaagctcttcacttctacttttgccggtgcatttactgaggatccccaggattatctagaaagcttccacgaggttctgagaaacatgggtattattgagaccaatggggttgattttgctacatttcgcttgtctggatccgccaagacttggttcaacgatttagctcgccatgctctcatcatacttcccaccgagagagagagggtgagaaggtttattgatggtcttattctgccaattcgtcttcagatggccaaggagggcgggagcgagatcacatttcaggaggcggtcaatgtggcccgcatagttgagatggttatgtcatatggaggtggtcataggtcggataagaggccccgtcattcaggaagattctgtggtattgttcaatcattcattttttgcccttaatttgcgccgaacccgctcggaacactttagctccgcccctgcctgccatgtttgttgttggtatcatgtaaaattttagcatgtaactcaacaccacaagtcaatgagacaacgaatgcagtaacccagctagggctatgcatcagtcgggtcggatcggatcagatcgaatttaacacatttcgaattgtaaattcggattccgatttttataaaatgcaatccgaatccaatccaaattaaattggatcggattggattttaaagtttgaatcgggtaaatatttcggattttcgaatcagatagtatgccttattaaggctactaacaatctaatcggctactacactttataaggcttaaattgaaaggcaacaaatgtcttttatagcaatagacaaaacaaagctccatagcaaaataaaataaactaaaattccaaacaaatgttatctcggctgggaatcaagccccaactcagagctgtgggccaggttgctttgctttatcggatcaatcagtatgcggtgggcaagctctttcccaagtcgctgagctgtttaacagagggaaggaaaaagaaatgacaaaacaaaaactacaaaggaaaaagaacaataccacagaatcttcctgaatgacggggcctcttatccgacctatgaccacctccatatgacataaccatctcaactatgcgggccacattgaccgcctcctgaaatgtgatctcgctcccgccctccttggccatctgaagacgaattggcagaataagaccatcaataaaccttctcaccctctctctctcggtgggaagtatgatgagagcatggcgagctaaatcgttgaaccaagtcttggcggatccagacaagcgaaatgtagcaaaatcaaccccattggtctcaataatacccatgtttctcagaacctcgtggaagctttctagataatcctggggatcctcagtaaatgcaccggcaaaagtagaagtgaagagcttggtgaactccggagtgcgtgtagaaggagtctgagcccctcctccagccagagaagtggctggtgctacaggaagaaaacatattcgggtgactctctccataaggcccaccaattgaaccagggcgtcctgaagaactagggtggcaataaaaccctctgggacctgagttaggcccaccaaagttaacccagctttcttgtacaaagttggcattataagaaagcattgcttatcaatttgttgcaacgaacaggtcactatcagtcaaaataaaatcattatttg

SEQ ID NO: 157 - DNA, 2138 bp, Artificial Sequence
  LARi8_c1, target gene is NDG8
  misc_feature (1)..(100): Gateway cloning site sequence
  misc_feature (2039)..(2138): Gateway cloning site sequence
caaataatgattttattttgactgatagtgacctgttcgttgcaacacattgatgagcaatgcttttttataatgccaactttgtacaaaaaagcaggctatggtgaagacttctaaaatggctccccaaaaagtcacttcttcttctcaaccgaccaccaaaattgatgaaaccactcctgatgtggtcgacctggagaggtacgctgctgatgtggttaccgatgaaccggctatcgaacctcccttaaaaatgttcattcccgagggttgtttggtcgccgacgactttaagctcggggctgcatcaggagagaagaagaagaagaagaaaagaaaggctttgggttccccgagctcagagaagaaaaaaccgaagagaagattggcctataagccaaaggatagctccagctctcgagcaccagactcagacttgctctactggctcagggaagagcatgaggaggatgatctttttacggcctacgaaccgacctcccccaaagagcgggcgatagccgaggaggagacaacaaaggcctgtctttctcaggttcgggagaccgatgtagaaacgagggctcagccttctcgagacgctggctctgctccacccagcatcaaagaaatttctgggtcaccttctttcaccgaatctatgttggacaaagctcgagcggagaaggagagatataacgaaggggcctatggtgtggacgacccccttcgttgcctttttgaaggtttcaatcattcattttttgcccttaatttgcgccgaacccgctcggaacactttagctccgcccctgcctgccatgtttgttgttggtatcatgtaaaattttagcatgtaactcaacaccacaagtcaatgagacaacgaatgcagtaacccagctagggctatgcatcagtcgggtcggatcggatcagatcgaatttaacacatttcgaattgtaaattcggattccgatttttataaaatgcaatccgaatccaatccaaattaaattggatcggattggattttaaagtttgaatcgggtaaatatttcggattttcgaatcagatagtatgccttattaaggctactaacaatctaatcggctactacactttataaggcttaaattgaaaggcaacaaatgtcttttatagcaatagacaaaacaaagctccatagcaaaataaaataaactaaaattccaaacaaatgttatctcggctgggaatcaagccccaactcagagctgtgggccaggttgctttgctttatcggatcaatcagtatgcggtgggcaagctctttcccaagtcgctgagctgtttaacagagggaaggaaaaagaaatgacaaaacaaaaactacaaaggaaaaagaaaccttcaaaaaggcaacgaagggggtcgtccacaccataggccccttcgttatatctctccttctccgctcgagctttgtccaacatagattcggtgaaagaaggtgacccagaaatttctttgatgctgggtggagcagagccagcgtctcgagaaggctgagccctcgtttctacatcggtctcccgaacctgagaaagacaggcctttgttgtctcctcctcggctatcgcccgctctttgggggaggtcggttcgtaggccgtaaaaagatcatcctcctcatgctcttccctgagccagtagagcaagtctgagtctggtgctcgagagctggagctatcctttggcttataggccaatcttctcttcggttttttcttctctgagctcggggaacccaaagcctttcttttcttcttcttcttcttctctcctgatgcagccccgagcttaaagtcgtcggcgaccaaacaaccctcgggaatgaacatttttaagggaggttcgatagccggttcatcggtaaccacatcagcagcgtacctctccaggtcgaccacatcaggagtggtttcatcaattttggtggtcggttgagaagaagaagtgactttttggggagccattttagaagtcttcaccatacccagctttcttgtacaaagttggcattataagaaagcattgcttatcaatttgttgcaacgaacaggtcactatcagtcaaaataaaatcattatttg

SEQ ID NO: 158 - DNA, 2648 bp, Artificial Sequence
  LARi9_c1, target gene is NDG9
  misc_feature (1)..(100): Gateway cloning site sequence
  misc_feature (2549)..(2648): Gateway cloning site sequence
caaataatgattttattttgactgatagtgacctgttcgttgcaacacattgatgagcaatgcttttttataatgccaactttgtacaaaaaagcaggctatgcaatattctgatcagcagtcctacagtgcaccaccagctcctatcagtgcactgctgctccagagttttcggggtggttattcaggtcgccagggtcagtctcagtttcctcagccacaacacttaggtggatgttttgagtgtggtgagtatggttatattaggaggacttgtccgaggttagtgggtactcagtcgcagcagcagggtttccgcgctatggttggggcaccaggttttccacagaccacccagccagctagaggttctagatgtggaggtagaggatttagaggtggagctcagaccgctagagccaagcccgaggctgaggctttagatgtagttattacaggtacggttcttgtttgtgatagagatgctttagtgttatttgatccagggtctacgtactcgtatgtgtcatcttattttgcaccgtatctggacatgcctagtgattcattgagtgttcctgtatatgtgtctacaccggtgggtgattctattatggtagatcgagtccatcgctcttttatagttgtgattgagggtcttgagactcgtgtagatctgttgcttctggacatggtcgatttctatgttatattggggatggactggttatcaccttaccacgctatcttagactatcatgccaagactgtgaccttagccttatcgggtttacctcgtttagagtggagaggtactcctagtcattctacccgtagtatgggcaatcttgcttatattccgggcggtgagagaccgcttgctttggatgttcgggatttggccaatcaattcatgaggttggatgtctctgagcccagccatgtgctagcttgcacagccgcttgttcttctttattggagcgtatccgtaatcggcagtatttcaatcattcattttttgcccttaatttgcgccgaacccgctcggaacactttagctccgcccctgcctgccatgtttgttgttggtatcatgtaaaattttagcatgtaactcaacaccacaagtcaatgagacaacgaatgcagtaacccagctagggctatgcatcagtcgggtcggatcggatcagatcgaatttaacacatttcgaattgtaaattcggattccgatttttataaaatgcaatccgaatccaatccaaattaaattggatcggattggattttaaagtttgaatcgggtaaatatttcggattttcgaatcagatagtatgccttattaaggctactaacaatctaatcggctactacactttataaggcttaaattgaaaggcaacaaatgtcttttatagcaatagacaaaacaaagctccatagcaaaataaaataaactaaaattccaaacaaatgttatctcggctgggaatcaagccccaactcagagctgtgggccaggttgctttgctttatcggatcaatcagtatgcggtgggcaagctctttcccaagtcgctgagctgtttaacagagggaaggaaaaagaaatgacaaaacaaaaactacaaaggaaaaagaaatactgccgattacggatacgctccaataaagaagaacaagcggctgtgcaagctagcacatggctgggctcagagacatccaacctcatgaattgattggccaaatcccgaacatccaaagcaagcggtctctcaccgcccggaatataagcaagattgcccatactacgggtagaatgactaggagtacctctccactctaaacgaggtaaacccgataaggctaaggtcacagtcttggcatgatagtctaagatagcgtggtaaggtgataaccagtccatccccaatataacatagaaatcgaccatgtccagaagcaacagatctacacgagtctcaagaccctcaatcacaactataaaagagcgatggactcgatctaccataatagaatcacccaccggtgtagacacatatacaggaacactcaatgaatcactaggcatgtccagatacggtgcaaaataagatgacacatacgagtacgtagaccctggatcaaataacactaaagcatctctatcacaaacaagaaccgtacctgtaataactacatctaaagcctcagcctcgggcttggctctagcggtctgagctccacctctaaatcctctacctccacatctagaacctctagctggctgggtggtctgtggaaaacctggtgccccaaccatagcgcggaaaccctgctgctgcgactgagtacccactaacctcggacaagtcctcctaatataaccatactcaccacactcaaaacatccacctaagtgttgtggctgaggaaactgagactgaccctggcgacctgaataaccaccccgaaaactctggagcagcagtgcactgataggagctggtggtgcactgtaggactgctgatcagaatattgcatacccagctttcttgtacaaagttggcattataagaaagcattgcttatcaatttgttgcaacgaacaggtcactatcagtcaaaataaaatcattatttg

SEQ ID NO: 159 - DNA, 923 bp, Artificial Sequence
  LARi10_c1, target gene is NDG10
  misc_feature (1)..(100): Gateway cloning site sequence
  misc_feature (824)..(923): Gateway cloning site sequence
caaataatgattttattttgactgatagtgacctgttcgttgcaacacattgatgagcaatgcttttttataatgccaactttgtacaaaaaagcaggctatgcggaggagtagaagaacaagcaatctcttccctcttgatcctgaaattgaaagatcacttcatagagagaggaaggagttggaagctagatacaaaacagaaagagagttgggcattttagttcaaccacagccaatagtgatggcaggtaatggagggcgttcggtgatagaagctcgaaggccaaatcttgctaatatgactcaggctattgttaagcctgatatcactgattactttgagcttaaacagtacacggtacagctaattcagtccactaggtaataagatcttcaacacctacaccatttttttaatcactactacccattgcattgaacaaacttccaagttcttcttagcttcagattaagaaagtaccctttcttggctttgttgatgtggtaccattgtccattgtcttgtgtgtttccacctagtggactgaattagctgtaccgtgtactgtttaagctcaaagtaatcagtgatatcaggcttaacaatagcctgagtcatattagcaagatttggccttcgagcttctatcaccgaacgccctccattacctgccatcactattggctgtggttgaactaaaatgcccaactctctttctgttttgtatctagcttccaactccttcctctctctatgaagtgatctttcaatttcaggatcaagagggaagagattgcttgttcttctactcctccgcatacccagctttcttgtacaaagttggcattataagaaagcattgcttatcaatttgttgcaacgaacaggtcactatcagtcaaaataaaatcattatttg

SEQ ID NO: 160 - DNA, 1559 bp, Artificial Sequence
  LARi11_c1, target gene is NDG11
  misc_feature (1)..(100): Gateway cloning site sequence
  misc_feature (1460)..(1559): Gateway cloning site sequence
caaataatgattttattttgactgatagtgacctgttcgttgcaacacattgatgagcaatgcttttttataatgccaactttgtacaaaaaagcaggcttaggcaaaacatcaagaacataaggaaggccataaaagtggctgacaaagacattgacatttcggggacccaagcatcagtgaacatttcttctaggtcgtctgagggctcaccagcgggtagtagggatgaatactctaccactcccacagcttcattatctgaagagggtgttgtaggagatgaggaagaagtaggtggtgacgatgaagtagaagaaggaggtgaaccacaagagtggtggccggtgagaaagttgatcccggagcggagtttcattgatagtgacttgctacctcacaaccccaacatgaggagacagtttaggatgagagttggctgggaccatttccttgataagtgtgaggattccaacgaacacttggtcaaagaattttacagcaatgtagcccacatcaaaaagggctccaaagtgaccaaggttcaaaattggaaggtgttgtttgatgggaagtatataaatgaatacctgagcttcaatgagaggacgagaccttatacatggcaaatttggaaatgggagaggagccggttggaccctaccactcatgacaacgcctttcctctccatcgggctgtatttaataagatcttcaacacctacaccatttttttaatcactactacccattgcattgaacaaacttccaagttcttcttagcttcagattaagaaagtaccctttcttggctttgttgatgtggtaccattgtccattgtcttgtgtgtttccaaatacagcccgatggagaggaaaggcgttgtcatgagtggtagggtccaaccggctcctctcccatttccaaatttgccatgtataaggtctcgtcctctcattgaagctcaggtattcatttatatacttcccatcaaacaacaccttccaattttgaaccttggtcactttggagccctttttgatgtgggctacattgctgtaaaattctttgaccaagtgttcgttggaatcctcacacttatcaaggaaatggtcccagccaactctcatcctaaactgtctcctcatgttggggttgtgaggtagcaagtcactatcaatgaaactccgctccgggatcaactttctcaccggccaccactcttgtggttcacctccttcttctacttcatcgtcaccacctacttcttcctcatctcctacaacaccctcttcagataatgaagctgtgggagtggtagagtattcatccctactacccgctggtgagccctcagacgacctagaagaaatgttcactgatgcttgggtccccgaaatgtcaatgtctttgtcagccacttttatggccttccttatgttcttgatgttttgcctaacccagctttcttgtacaaagttggcattataagaaagcattgcttatcaatttgttgcaacgaacaggtcactatcagtcaaaataaaatcattatttg

SEQ ID NO: 161 - DNA, 2348 bp, Artificial Sequence
  LARi12_c1, target gene is NDG12
  misc_feature (1)..(100): Gateway cloning site sequence
  misc_feature (2249)..(2348): Gateway cloning site sequence
caaataatgattttattttgactgatagtgacctgttcgttgcaacacattgatgagcaatgcttttttataatgccaactttgtacaaaaaagcaggctaaatgcagattctgatgcacagttggctttccacaatacctcaatcagaaatttggaggttcagataggccaaatctctcagtccttgaatacacgccctaagggtgctctaccaagtgatatagtagtaaacccaaagggtgagaacaatcatgttatggcagtaactacaaggagtggacgaggcggtgatgtgaatgcctctaaacaaaagcaagttttgagtgatgatattgagttgcaagaagatgaagttcctttggttgtagaaaatgtgatagatgacaatatgaatgaagaagtgatgattgatattcaagatgccgaggtggaaactcaaaatgacgtgaacccgtctagggaacacgtaatagatatgtcggagctggtggtgcctaaagccaagtatcaatttgattcctactcggttttcaaaattttgtgtattgggcaacctaggccgacttccatgagattacaaatggcggatagaacgatgaagagatcattggatattatcgatgatgtccttatccgggtggacaaatttatcttgccagctgattttgtgatcttggactgtgaggtggattatgaagttcctatcatattggggagatctttccttgctaccgggaaggccttagttcatgtggaagtaggggacctcacctttcgggtgggtgatgaaaaagtggtctttcatgtttacaagtcaatgaaacagcccaacagtaccaaagtgtgctctttttcaatcattcattttttgcccttaatttgcgccgaacccgctcggaacactttagctccgcccctgcctgccatgtttgttgttggtatcatgtaaaattttagcatgtaactcaacaccacaagtcaatgagacaacgaatgcagtaacccagctagggctatgcatcagtcgggtcggatcggatcagatcgaatttaacacatttcgaattgtaaattcggattccgatttttataaaatgcaatccgaatccaatccaaattaaattggatcggattggattttaaagtttgaatcgggtaaatatttcggattttcgaatcagatagtatgccttattaaggctactaacaatctaatcggctactacactttataaggcttaaattgaaaggcaacaaatgtcttttatagcaatagacaaaacaaagctccatagcaaaataaaataaactaaaattccaaacaaatgttatctcggctgggaatcaagccccaactcagagctgtgggccaggttgctttgctttatcggatcaatcagtatgcggtgggcaagctctttcccaagtcgctgagctgtttaacagagggaaggaaaaagaaatgacaaaacaaaaactacaaaggaaaaagaaaaagagcacactttggtactgttgggctgtttcattgacttgtaaacatgaaagaccactttttcatcacccacccgaaaggtgaggtcccctacttccacatgaactaaggccttcccggtagcaaggaaagatctccccaatatgataggaacttcataatccacctcacagtccaagatcacaaaatcagctggcaagataaatttgtccacccggataaggacatcatcgataatatccaatgatctcttcatcgttctatccgccatttgtaatctcatggaagtcggcctaggttgcccaatacacaaaattttgaaaaccgagtaggaatcaaattgatacttggctttaggcaccaccagctccgacatatctattacgtgttccctagacgggttcacgtcattttgagtttccacctcggcatcttgaatatcaatcatcacttcttcattcatattgtcatctatcacattttctacaaccaaaggaacttcatcttcttgcaactcaatatcatcactcaaaacttgcttttgtttagaggcattcacatcaccgcctcgtccactccttgtagttactgccataacatgattgttctcaccctttgggtttactactatatcacttggtagagcacccttagggcgtgtattcaaggactgagagatttggcctatctgaacctccaaatttctgattgaggtattgtggaaagccaactgtgcatcagaatctgcatttacccagctttcttgtacaaagttggcattataagaaagcattgcttatcaatttgttgcaacgaacaggtcactatcagtcaaaataaaatcattatttg

SEQ ID NO: 162 - DNA, 1505 bp, Artificial Sequence
  LARi13_c1, target gene is NDG13
  misc_feature (1)..(100): Gateway cloning site sequence
  misc_feature (1406)..(1505): Gateway cloning site sequence
caaataatgattttattttgactgatagtgacctgttcgttgcaacacattgatgagcaatgcttttttataatgccaactttgtacaaaaaagcaggctctcagcctagagcagcagcaccagcggcggagcctcaggttgagtttgatgatgaggttacgacccaggaagttccggtgggcctagctcatgtctcagaggggttcattgctaccccagtactccaagatgctctgatggctccccagtttcagactctaacaactcagccagttggagcagttcagccggatgtggtagctcagaccggtgatagagcagctatgtctgtcgatgccttgtggagattggacaggttcaccaagctcttcactaccacttttagcggtgcatctttggaggatccccaggattatttggacagatgtcatgaggttctcaggaacatggggatattggagaccaatgggatcgactttgctactttttgcttatctggattcgccaagacttgtacgagaccaggtttattgatttggcccgtcatgatctacttatactccccattgagagagagagtgaggaggttcattgagggactcattcagcctattcgacttcagatggatgaggagacagggagtgagatttctttccaggaggtagccaatgtggtaataagatcttcaacacctacaccatttttttaatcactactacccattgcattgaacaaacttccaagttcttcttagcttcagattaagaaagtaccctttcttggctttgttgatgtggtaccattgtccattgtcttgtgtgtttccaccacattggctacctcctggaaagaaatctcactccctgtctcctcatccatctgaagtcgaataggctgaatgagtccctcaatgaacctcctcactctctctctcaatggggagtataagtagatcatgacgggccaaatcaataaacctggtctcgtacaagtcttggcgaatccagataagcaaaaagtagcaaagtcgatcccattggtctccaatatccccatgttcctgagaacctcatgacatctgtccaaataatcctggggatcctccaaagatgcaccgctaaaagtggtagtgaagagcttggtgaacctgtccaatctccacaaggcatcgacagacatagctgctctatcaccggtctgagctaccacatccggctgaactgctccaactggctgagttgttagagtctgaaactggggagccatcagagcatcttggagtactggggtagcaatgaacccctctgagacatgagctaggcccaccggaacttcctgggtcgtaacctcatcatcaaactcaacctgaggctccgccgctggtgctgctgctctaggctgagacccagctttcttgtacaaagttggcattataagaaagcattgcttatcaatttgttgcaacgaacaggtcactatcagtcaaaataaaatcattatttg

SEQ ID NO: 163 - DNA, 1373 bp, Artificial Sequence
  LARi14_c1, target gene is NDG14
  misc_feature (1)..(100): Gateway cloning site sequence
  misc_feature (1274)..(1373): Gateway cloning site sequence
caaataatgattttattttgactgatagtgacctgttcgttgcaacacattgatgagcaatgcttttttataatgccaactttgtacaaaaaagcaggctatcgagttactctggcgcagatttatccatcgtttcggcgaatggtaatgataatgaggttcttcgtggagaaggttgggctcgaattcacgtttaatcacctcgttagactataccggccatttcattatcgaggcctgctaactctgaggtgccgtttgtccacgccctttgttgtcgatgatgaagaagacaaggaccgagagtgggccagttggtttattcaggctcaaactgctgacattatcccaacagggcttttgccatttcctgaagggtggaatcatgcaccaacttcgtggatgccgggcaaagtccttgaccttcccgtctgggtccataagttggcgacccattcgacttgcgacgagcgcaggtggcgagctgtatttcgtaccaaatggggagtgaaataccaagggcggttgtttgggatgagacagtgttcttccgaagaggagaaagagtcgtcagcctccaagccgagggaggatggtgataagggggatctaataagatcttcaacacctacaccatttttttaatcactactacccattgcattgaacaaacttccaagttcttcttagcttcagattaagaaagtaccctttcttggctttgttgatgtggtaccattgtccattgtcttgtgtgtttccagatcccccttatcaccatcctccctcggcttggaggctgacgactctttctcctcttcggaagaacactgtctcatcccaaacaaccgcccttggtatttcactccccatttggtacgaaatacagctcgccacctgcgctcgtcgcaagtcgaatgggtcgccaacttatggacccagacgggaaggtcaaggactttgcccggcatccacgaagttggtgcatgattccacccttcaggaaatggcaaaagccctgttgggataatgtcagcagtttgagcctgaataaaccaactggcccactctcggtccttgtcttcttcatcatcgacaacaaagggcgtggacaaacggcacctcagagttagcaggcctcgataatgaaatggccggtatagtctaacgaggtgattaaacgtgaattcgagcccaaccttctccacgaagaacctcattatcattaccattcgccgaaacgatggataaatctgcgccagagtaactcgatacccagctttcttgtacaaagttggcattataagaaagcattgcttatcaatttgttgcaacgaacaggtcactatcagtcaaaataaaatcattatttg

SEQ ID NO: 164 - DNA, 1385 bp, Artificial Sequence
  LARi15_c1, target gene is NDG15
  misc_feature (1)..(100): Gateway cloning site sequence
  misc_feature (1286)..(1385): Gateway cloning site sequence
caaataatgattttattttgactgatagtgacctgttcgttgcaacacattgatgagcaatgcttttttataatgccaactttgtacaaaaaagcaggctggagaagttacaggtgcaaggatggaaggacatggtctttcagatgatggaaggatacaatgactataagaagctcaaatggacaagcctagagaatctccctactgcccttgccagtactagaaaattttgtgacaatgaggaggaaattgagcccaaggctatttacaaaaatgagatgaagccacccaacaaagtgttgctccaatttgtaaacaaatgtgtgctgccaagggttctaaatggaactaagacttatgtcataccctatggttttattctcacgattgttcttgcacatttaaaggtacccatcaagaaatgggaagttggtacaaacaaggatcattttggggctaacactttgactgcttgtaactatgaggctcaaatcactcccaaaaaacctggttcatccaaaaaggtaccagtgaatagcaaagtgcgagttttggtgcaagaaagtagggcaaaggatgctgagcctgataggctaaagaagaggttggctgaaattaataagatcttcaacacctacaccatttttttaatcactactacccattgcattgaacaaacttccaagttcttcttagcttcagattaagaaagtaccctttcttggctttgttgatgtggtaccattgtccattgtcttgtgtgtttccaatttcagccaacctcttctttagcctatcaggctcagcatcctttgccctactttcttgcaccaaaactcgcactttgctattcactggtacctttttggatgaaccaggttttttgggagtgatttgagcctcatagttacaagcagtcaaagtgttagccccaaaatgatccttgtttgtaccaacttcccatttcttgatgggtacctttaaatgtgcaagaacaatcgtgagaataaaaccatagggtatgacataagtcttagttccatttagaacccttggcagcacacatttgtttacaaattggagcaacactttgttgggtggcttcatctcatttttgtaaatagccttgggctcaatttcctcctcattgtcacaaaattttctagtactggcaagggcagtagggagattctctaggcttgtccatttgagcttcttatagtcattgtatccttccatcatctgaaagaccatgtccttccatccttgcacctgtaacttctccacccagctttcttgtacaaagttggcattataagaaagcattgcttatcaatttgttgcaacgaacaggtcactatcagtcaaaataaaatcattatttg

SEQ ID NO: 165 - DNA, 26 bp, Artificial Sequence
  PMG-RT8-F1
tgagcttaaagtcaaggatgaaaaga

SEQ ID NO: 166 - DNA, 24 bp, Artificial Sequence
  PMG-RT8-R1
ggttcctgattccaaagactctga

SEQ ID NO: 167 - DNA, 18 bp, Artificial Sequence
  PMG-RT8-TM1
tctttttggtgagaagtc

SEQ ID NO: 168 - DNA, 21 bp, Artificial Sequence
  NDG1_T1RA1_F
cagaggcgtggaagacagaaa

SEQ ID NO: 169 - DNA, 21 bp, Artificial Sequence
  NDG1_T1RA1_R
tcaaagcccaccacatcatct

SEQ ID NO: 170 - DNA, 15 bp, Artificial Sequence
  NDG1_T1RA1_probe
cctcccgtggttgag

SEQ ID NO: 171 - DNA, 22 bp, Artificial Sequence
  NDG1_T1A2_F
gctcaccagagggcttcataga

SEQ ID NO: 172 - DNA, 16 bp, Artificial Sequence
  NDG1_T1A2_R
ccgccgcttgtgcatt

SEQ ID NO: 173 - DNA, 21 bp, Artificial Sequence
  NDG1_T1A2_probe
atgaattccagaactgaggaa

SEQ ID NO: 174 - DNA, 23 bp, Artificial Sequence
  PMT1a_F
gggttctgtcaactatgcttgga

SEQ ID NO: 175 - DNA, 27 bp, Artificial Sequence
  PMT1a_R
tcagtagagcagagcatataaccaatc

SEQ ID NO: 176 - DNA, 25 bp, Artificial Sequence
  PMT1a_probe
accgttccaacatatcccaccggtg

1. A tobacco plant, or part thereof, comprising a mutation in Nic1 locus, a mutation in Nic2 locus, or both, wherein said tobacco plant is capable of producing leaves having a USDA grade index value of at least about 65% of the USDA grade index value of leaves of a control plant when grown in similar growth conditions, wherein said control plant shares an essentially identical genetic background with said tobacco plant except said mutation.

2. The tobacco plant, or part thereof, of claim 1, wherein said tobacco plant is capable of producing leaves having a USDA grade index value of 50 or more.

3. The tobacco plant, or part thereof, of claim 1, wherein said tobacco plant comprises nicotine at a level below 25% of the nicotine level of a control plant when grown in similar growth conditions, wherein said control plant shares an essentially identical genetic background with said tobacco plant except said mutation.

4. The tobacco plant, or part thereof, of claim 1, wherein said tobacco plant comprises a nicotine level less than 2.0%.

5. A tobacco plant, or part thereof, comprising one or more mutations within one or more genes encoding a polypeptide having at least 80% identity to a sequence selected from the group consisting of SEQ ID NOs: 49 to 68, 84, 116 to 130, 147, and fragments thereof, wherein said tobacco plant comprises a lower level of nicotine compared to a control tobacco plant without said one or more mutation when grown in similar growth conditions, wherein said mutation is absent from a LA Burley 21 variety.

6. The tobacco plant, or part thereof, of claim 5, wherein said tobacco plant comprises nicotine at a level below 20% of the nicotine level in a control tobacco plant without said one or more mutations when grown in similar growth conditions.

7. The tobacco plant, or part thereof, of claim 5, wherein said tobacco plant further comprises a mutation in Nic2 locus.

8. The tobacco plant, or part thereof, of claim 5, wherein said one or more genes encode a polypeptide having at least 90% identity to a sequence selected from the group consisting of SEQ ID NOs: 53, 68, 116, 117, 147, and fragments thereof.

9. The tobacco plant, or part thereof, of claim 5, wherein said tobacco plant is from a variety selected from the group consisting of cigar tobacco, flue-cured tobacco, air-cured tobacco, dark fire-cured tobacco, Galpao tobacco, and Oriental tobacco.

10. A population of the tobacco plants of claim 5.

11. Cured tobacco material from the tobacco plant of claim 5.

12. The cured tobacco material of claim 11, wherein said cured tobacco material comprises a lower level of nicotine compared to cured tobacco material from a control tobacco plant without said mutation.

13. The cured tobacco material of claim 11, wherein said tobacco plant comprises nicotine at a level between 0.2% and 0.6%.

14. The cured tobacco material of claim 11, wherein said cured tobacco material is made by a curing process selected from the group consisting of flue curing, air curing, fire curing, and sun curing.

15. A tobacco product comprising the cured tobacco material of claim 11.

16. The tobacco product of claim 15, wherein said tobacco product is selected from the group consisting of a cigarette, a cigarillo, a non-ventilated recess filter cigarette, a vented recess filter cigarette, a cigar, snuff, pipe tobacco, cigar tobacco, cigarette tobacco, chewing tobacco, leaf tobacco, shredded tobacco, and cut tobacco.

17. The tobacco product of claim 15, wherein said tobacco product is a smokeless tobacco product.

18. A tobacco plant, or part thereof, comprising a mutation selected from the group consisting of a first chromosomal deletion flanked by and not comprising any two of Nic1 Marker Nos. 1 to 207, a second chromosomal deletion flanked by and not comprising any two of Nic2 Marker Nos. 1 to 340, and both said first and said second chromosomal deletions, wherein said tobacco plant is capable of producing leaves having a USDA grade index value comparable to that of leaves of a control plant when grown in similar growth conditions, wherein said control plant shares an essentially identical genetic background with said tobacco plant except said mutation.

19. The tobacco plant, or part thereof, of claim 18, wherein said tobacco plant comprises nicotine at a level below 10% of the nicotine level of said control plant when grown in similar growth conditions.

20. The tobacco plant, or part thereof, of claim 18, wherein said tobacco plant is capable of producing leaves having a USDA grade index value of 50 or more.
